(19) United States
(12) Patent Application Publication
(10) Pub. No.: US 2016/0058881 A1
(43) Pub. Date: Mar. 3, 2016

(54) PRODRUGS WITH PROLONGED ACTION

(71) Applicant: INDIANA UNIVERSITY RESEARCH AND TECHNOLOGY CORPORATION, Indianapolis, IN (US)

(72) Inventors: RICHARD D. DIMARCHI, Carmel, IN (US); Binbin KOU, Bloomington, IN (US)

(21) Appl. No.: 14/775,985

(22) PCT Filed: Mar. 14, 2014
(86) PCT No.: PCT/US2014/027363

§ 371 Date: Sep. 14, 2015

Related U.S. Application Data
(60) Provisional application No. 61/792,459, filed on Mar. 15, 2013.

(51) Int. Cl. A61K 47/48; A61K 45/06; A61K 38/26

(52) U.S. Cl. CPC A61K 47/48338; A61K 38/26; A61K 45/06

(57) ABSTRACT

A prodrug derivative of a bioactive peptide (or polypeptide) is provided that exhibits prolonged half-life in serum and prolonged action in vivo, compared to the parent peptide or polypeptide. In some embodiments, the peptide is selected from the group consisting of glucagon, exendin-4, GLP-1, GLP-2, GIP, vasoactive intestinal peptide (VIP), Pituitary adenylate cyclase-activating polypeptide 27 (PACAP-27), peptide histidine methionine (PHM), oxyntomodulin, secretin, osteocalcin, growth hormone releasing hormone, as well as analogs, derivatives and conjugates.

### CROSS REFERENCE TO RELATED APPLICATIONS

[0001] This application claims priority to U.S. Provisional Patent Application No. 61/792,459, filed on Mar. 15, 2013, which is incorporated by reference in its entirety.

### INCORPORATION BY REFERENCE OF MATERIAL SUBMITTED ELECTRONICALLY

[0002] Incorporated by reference in its entirety is a computer-readable nucleotide/amino acid sequence listing submitted concurrently herewith and identified as follows: One 1,690,541 byte ASCII (Text) file named “229199_SeqListing.txt,” created on Mar. 14, 2014.

### BACKGROUND

[0003] Peptide-based drugs are highly effective medicines with relatively short duration of action and variable therapeutic index. The present disclosure is directed to peptide-based prodrugs wherein the prodrug derivative exhibits prolonged action.

### SUMMARY

[0004] A prodrug derivative of a bioactive peptide (or polypeptide) is provided that exhibits prolonged half-life in serum and prolonged action in vivo, compared to the parent peptide or polypeptide. In some embodiments, the peptide is selected from the group consisting of glucagon, exendin-4, GLP-1, GLP-2, GIP, vasoactive intestinal peptide (VIP), Pituitary adenylate cyclase-activating polypeptide 27 (PACAP-27), peptide histidine methionine (PHM), oxyntomodulin, secretin, osteocalcin, growth hormone releasing hormone, as well as analogs, derivatives and conjugates. The prodrug derivative comprises (a) a self-cleaving dipeptide prodrug element covalently linked to the bioactive polypeptide via an amide linkage, and (b) an acyl or alkyl group, including a fatty acid, cholic acid, or steroid moiety of a bile acid, that is preferably at least 16, 18, or 20 carbons in length, linked to the dipeptide prodrug element. Preferably, the dipeptide is covalently bound to the bioactive polypeptide at a position that interferes with the bioactive polypeptide's ability to interact with its corresponding receptor or cofactor. Subsequent self-cleavage and removal of the dipeptide, under physiological conditions and in the absence of enzymatic activity, restores full activity to the polypeptide.

[0005] The disclosure provides a prodrug comprising the structure:

A-B-Q;
[0006] wherein Q is a glucagon superfamily peptide or other bioactive peptide or polypeptide;
[0007] A is an amino acid, optionally a D amino acid, covalently linked to an acyl or alkyl group (including a fatty acid, cholic acid, or steroid moiety of a bile acid) at least 16 carbons in length (e.g., at least C16, C18, or C20, or ranging in length from C16 to C30, or C20 to C28); and
[0008] B is an N-alkylated amino acid linked to Q through formation of an amide bond between A-B and a residue of Q comprising a (C1-C8 alkyl)NH₂ side chain.
   In some embodiments the N-alkylated group of amino acid B is a C₁-C₁₈ alkyl, and in some embodiments is C₁-C₆ alkyl.

[0009] It has been shown that prodrugs of this structure can exhibit a prolonged cleavage half-life of A-B from Q in either phosphate buffered saline or serum, under physiological conditions, of at least about 3 days, at least about 5 days, or 3-10 days, or 5-10 days, or 3-7 days or 5-8 days. Data herin shows that this prolonged in vitro half-life correlates to a prolonged in vivo half-life.

[0010] Thus, the disclosure also provides methods of administering the prodrugs of the disclosure, for example, that involve administration twice a week, or preferably once every week, or once every two weeks. Such prodrugs are preferably administered parenterally, e.g. intravenously, subcutaneously, intradermally, or intrapulmonary.

[0011] In one aspect of the disclosure, there is provided a prodrug comprising the structure:
[0012] A-B-Q;
   wherein Q is a glucagon superfamily peptide;
   A is an amino acid, optionally a D amino acid, covalently linked to a C₁₆-C₃₀ acyl group or a C₁₆-C₃₀ alkyl group; and
   B is an N-alkylated amino acid linked to Q through an amide bond between A-B and a residue of Q comprising a (C₁-C₈ alkyl)NH₂ side chain.

[0013] In some or any embodiments, the cleavage half-life of A-B from Q in serum under physiological conditions is at least about 3 days, at least about 5 days, or about 3 days to about 10 days, or about 5 days to about 10 days, or about 3 days to about 7 days, or about 5 days to about 8 days.

[0014] In some or any embodiments, the residue of Q comprising a (C₁-C₈ alkyl)NH₂ side chain is located at a position corresponding to position 1, 10, 11, 12, 13, 14, 15, 16, 17, 18, 19, 20, 28, or 29 of native glucagon (SEQ ID NO: 701), or at one of the last 5 amino acids at the C-terminus of Q.

[0015] In some or any embodiments, A-B comprises the structure:

[chemical structure]

wherein
R₁ and R₂ are independently selected from the group consisting of H, C₁-C₁₈ alkyl, C₂-C₁₈ alkenyl, (C₁-C₁₈ alkyl)OR₉, (C₁-C₁₈ alkyl)SR₉, (C₂-C₃ alkyl)SCH₃, (C₁-C₄ alkyl)CONHR₉, (C₁-C₄ alkyl)COOR₉, (C₁-C₄ alkyl)NHR₉, (C₁-C₄ alkyl)NHC(NH₂⁺)NH₂, (C₀-C₄ alkyl)(C₃-C₆ cycloalkyl), (C₀-C₄ alkyl)(C₂-C₅ heterocyclic), (C₀-C₄ alkyl)(C₆-C₁₀ aryl)R₇, (C₁-C₄ alkyl)(C₃-C₉ heteroaryl), and C₁-C₁₂ alkyl(W₁)C₁-C₁₂ alkyl, wherein W₁ is a heteroatom selected from the group consisting of N, S and O, or R₁ and R₂ together with the atoms to which they are attached form a C₃-C₁₂ cycloalkyl or aryl;
R₄ and R₈ are independently selected from the group consisting of H, C₁-C₁₈ alkyl, C₂-C₁₈ alkenyl, (C₁-C₁₈ alkyl)OH, (C₁-C₁₈ alkyl)SH, (C₂-C₃ alkyl)SCH₃, (C₁-C₄ alkyl)CONH₂, (C₁-C₄ alkyl)COOH, (C₁-C₄ alkyl)NH₂, (C₁-C₄ alkyl)NHC(NH₂⁺)NH₂, (C₀-C₄ alkyl)(C₃-C₆ cycloalkyl), (C₀-C₄ alkyl)(C₂-C₅ heterocyclic), (C₀-C₄ alkyl)(C₆-C₁₀ aryl)R₇, (C₁-C₄ alkyl)(C₃-C₉ heteroaryl), and C₁-C₁₂ alkyl(W₁)C₁-C₁₂ alkyl, wherein W₁ is a heteroatom selected from the group consisting of N, S and O, or R₄ and R₈ together with the atoms to which they are attached form a C₃-C₆ cycloalkyl;
R₃ is C₁-C₁₈ alkyl or R₄ and R₃ together with the atoms to which they are attached form a 4, 5 or 6 member heterocyclic ring;

### R₅ is NHR₆ or NHR₉;

[0016] R₆ is H, C₁-C₈ alkyl or R₆ and R₂ together with the atoms to which they are attached form a 4, 5 or 6 member heterocyclic ring;
R₇ is selected from the group consisting of H, OR₉, C₁-C₁₈ alkyl, C₂-C₁₈ alkenyl, (C₀-C₄ alkyl)CONHR₉, (C₀-C₄ alkyl)COOR₉, (C₀-C₄ alkyl)NHR₉, (C₀-C₄ alkyl)OR₉, and halo; and
R₉ is selected from the group consisting of H, C₁₆-C₃₀ acyl, and C₁₆-C₃₀ alkyl.

[0017] In some or any embodiments, R₁ and R₈ are independently H or C₁-C₈ alkyl.

[0018] In some or any embodiments, R₄ is selected from the group consisting of H, C₁-C₈ alkyl, C₂-C₈ alkenyl, (C₁-C₄ alkyl)OH, (C₁-C₄ alkyl)SH, (C₂-C₃ alkyl)SCH₃, (C₁-C₄ alkyl)CONH₂, (C₁-C₄ alkyl)COOH, (C₁-C₄ alkyl)NH₂, (C₁-C₄ alkyl)NHC(NH₂⁺)NH₂, (C₀-C₄ alkyl)(C₃-C₆ cycloalkyl), (C₀-C₄ alkyl)(C₂-C₅ heterocyclic), (C₀-C₄ alkyl)(C₆-C₁₀ aryl)R₇, (C₁-C₄ alkyl)(C₃-C₉ heteroaryl), and C₁-C₁₂ alkyl(W₁)C₁-C₁₂ alkyl, wherein W₁ is a heteroatom selected from the group consisting of N, S and O, or R₄ and R₈ together with the atoms to which they are attached form a C₃-C₆ cycloalkyl.

[0019] In some or any embodiments, R₃ is C₁-C₈ alkyl or R₄ and R₃ together with the atoms to which they are attached form a 4, 5 or 6 member heterocyclic ring.

[0020] In some or any embodiments, R₃ is C₁-C₈ alkyl.

[0021] In some or any embodiments, R₂ is selected from the group consisting of H, C₁-C₈ alkyl, C₂-C₈ alkenyl, (C₁-C₄ alkyl)OR₉, (C₁-C₄ alkyl)SR₉, (C₂-C₃ alkyl)SCH₃, (C₁-C₄ alkyl)CONHR₉, (C₁-C₄ alkyl)COOR₉, (C₁-C₄ alkyl)NHR₉, (C₁-C₄ alkyl)NHC(NH₂⁺)NH₂, (C₀-C₄ alkyl)(C₃-C₆ cycloalkyl), (C₀-C₄ alkyl)(C₂-C₅ heterocyclic), (C₀-C₄ alkyl)(C₆-C₁₀ aryl)R₇, (C₁-C₄ alkyl)(C₃-C₉ heteroaryl), and C₁-C₁₂ alkyl(W₁)C₁-C₁₂ alkyl, wherein W₁ is a heteroatom selected from the group consisting of N, S and O, or R₁ and R₂ together with the atoms to which they are attached form a C₃-C₁₂ cycloalkyl or aryl.

[0022] In some or any embodiments, R₂ is selected from the group consisting of (C₁-C₄ alkyl)OR₉, (C₁-C₄ alkyl)SR₉, (C₁-C₄ alkyl)CONHR₉, (C₁-C₄ alkyl)COOR₉, (C₁-C₄ alkyl)NHR₉, and (C₀-C₁ alkyl)(C₆-C₁₀ aryl)R₇; and R₇ is selected from the group consisting of OR₉, (C₀-C₁ alkyl)CONHR₉, (C₀-C₁ alkyl)COOR₉, (C₀-C₁ alkyl)NHR₉, and (C₀-C₄ alkyl)OR₉.

[0023] In some or any embodiments, R₅ is NHR₆.

[0024] In some or any embodiments, R₁, R₄ and R₈ are independently selected from the group consisting of H and C₁-C₁₈ alkyl, or R₄ and R₈ together with the atoms to which they are attached form a C₃-C₆ cycloalkyl; R₂ is selected from the group consisting of (C₁-C₁₈ alkyl)OR₉, (C₁-C₁₈ alkyl)SR₉, (C₁-C₄ alkyl)CONHR₉, (C₁-C₄ alkyl)COOR₉, (C₁-C₄ alkyl)NHR₉, and (C₀-C₄ alkyl)(C₆-C₁₀ aryl)R₇; R₆ is H or C₁-C₈ alkyl; and R₇ is selected from the group consisting of OR₉, (C₀-C₄ alkyl)CONHR₉, (C₀-C₄ alkyl)COOR₉, (C₀-C₄ alkyl)NHR₉, and (C₀-C₄ alkyl)OR₉.

[0025] In some or any embodiments, R₁, R₄ and R₈ are independently selected from the group consisting of H and C₁-C₈ alkyl, or R₄ and R₈ together with the atoms to which they are attached form a C₃-C₆ cycloalkyl; R₂ is selected from the group consisting of (C₁-C₈ alkyl)OR₉, (C₁-C₈ alkyl)SR₉, (C₁-C₄ alkyl)CONHR₉, (C₁-C₄ alkyl)COOR₉, (C₁-C₄ alkyl)NHR₉, and (C₀-C₄ alkyl)(C₆-C₁₀ aryl)R₇; and R₃ is C₁-C₈ alkyl or R₄ and R₃ together with the atoms to which they are attached form a 4, 5 or 6 member heterocyclic ring.

[0026] In some or any embodiments, R₂ is selected from the group consisting of (C₁-C₈ alkyl)OR₉, (C₁-C₈ alkyl)SR₉, and (C₁-C₄ alkyl)NHR₉; and R₃ is C₁-C₈ alkyl or R₄ and R₃ together with the atoms to which they are attached form a 4, 5 or 6 member heterocyclic ring.

[0027] In some or any embodiments, R₂ is (C₁-C₄ alkyl)NHR₉; and R₃ is C₁-C₈ alkyl or R₄ and R₃ together with the atoms to which they are attached form a 4, 5 or 6 member heterocyclic ring.

[0028] In some or any embodiments, R₁, R₄ and R₈ are H; and R₃ is C₁-C₈ alkyl.

[0029] In some or any embodiments, R₅ is NHR₆; and R₉ is selected from the group consisting of C₁₆-C₃₀ acyl and C₁₆-C₃₀ alkyl.

[0030] In some or any embodiments, R₁, R₄, and R₈ are H; R₂ is (C₁-C₄ alkyl)NHR₉; R₃ is C₁-C₈ alkyl; R₅ is NHR₆; R₆ is H or C₁-C₈ alkyl; and R₉ is selected from the group consisting of C₁₆-C₃₀ acyl and C₁₆-C₃₀ alkyl.

[0031] In some or any embodiments, R₉ is selected from the group consisting of C₂₀-C₂₈ acyl and C₂₀-C₂₈ alkyl.

[0032] In some or any embodiments, R₂ is (CH₂)₄NHR₉; R₃ is CH₃; R₅ is NH₂; and R₉ is C₂₀-C₂₈ acyl.

[0033] In some or any embodiments, R₂ is selected from the group consisting of (CH₂)₄NHCO(CH₂)₁₆CH₃ and (CH₂)₄NHCO(CH₂)₂₀CH₃.

[0034] In some or any embodiments, A-B is linked to a residue of Q comprising a (C₂-C₄ alkyl)NH₂ side chain.

[0035] In some or any embodiments, A-B is linked to a residue of Q that is a lysine residue.

[0036] In some or any embodiments, A is a D amino acid.

[0037] In some or any embodiments, Q is a glucagon superfamily peptide. For example, Q is a glucagon related peptide, Growth Hormone Releasing Hormone (GHRH; SEQ ID NO: 719), vasoactive intestinal peptide (VIP; SEQ ID NO: 720), Pituitary adenylate cyclase-activating polypeptide 27 (PACAP-27; SEQ ID NO: 721), peptide histidine methionine (PHM; SEQ ID NO: 722), or Secretin (SEQ ID NO: 723), and/or analogs, derivatives and conjugates thereof. In some embodiments, the analogs comprise an amino acid sequence that is at least about 40%, 45%, 50%, 55%, 60%, 65%, 70%, 75%, 80%, 85%, 90%, or 95% identical to the corresponding sequence of the native peptide. In some embodiments Q as a glucagon related peptide comprises an amino acid sequence that is at least about 40%, 45%, 50%, 55%, 60%, 65%, 70%, 75%, 80%, 85%, 90%, or 95% identical to the corresponding sequence of native glucagon, native oxyntomodulin, native exendin-4, native (7-37)GLP-1, native GLP-2, or native GIP over the length of the native peptide (or over the positions which correspond to glucagon, see e.g., FIG. 10). In other embodiments, a glucagon superfamily peptide (Q) comprises an amino acid sequence of native glucagon, native exendin-4, native (7-37)GLP-1, native GLP-2, native GHRH, native VIP, native PACAP-27, native PHM, native Oxyntomodulin, native Secretin, or native GIP with up to 1, 2, 3, 4, 5, 6, 7, 8, 9 or 10 amino acid modifications. In still further embodiments, Q comprises an amino acid sequence which is a chimera of two or more native glucagon related peptide sequences. In some embodiments, Q comprises an amino acid sequence at least about 50% identical to native glucagon (SEQ ID NO: 701) that retains the alpha-helix conformation of the amino acids corresponding to amino acids 12-29 of SEQ ID NO: 701.

[0038] Glucagon superfamily peptides may have common structural characteristics, including but not limited to homology within the N-terminal amino acids and/or alpha-helical structure within the C-terminal portion. It is believed that the C-terminus generally functions in receptor binding and the N-terminus generally functions in receptor signaling. A few amino acids in the N-terminal portion and C-terminal portion are highly conserved among members of the glucagon superfamily, for example, His1, Gly4, Phe6, Phe22, Val23, Trp25, and Leu26, with amino acids at these positions showing identity, conservative substitutions or similarity in amino acid side chains.

[0039] Q may be any of the glucagon superfamily peptides that are known in the art, including for example, any glucagon related peptides as known in the art, some of which are disclosed herein by way of nonlimiting examples. A variety of GLP-1 analogs are known in the art and are a glucagon-related peptide according to the current invention, see, e.g., WO 2008023050, WO 2007030519, WO 2005058954, WO 2003011892, WO 2007046834, WO 2006134340, WO 2006124529, WO 2004022004, WO 2003018516, WO 2007124461 each incorporated herein by reference in its entirety for each of its sequence or formula disclosures of GLP-1 analogs or derivatives. In some or any embodiments, Q is a Class 1, 2, 3, 4, 5 or 6 glucagon related peptide as detailed herein. In any of the embodiments described herein, Q is any of SEQ ID NOs: 1-684, 701-742, 801-919, 1001-1262, 1301-1371, 1401-1518, 1701-1776, 1801-1908, 2001-2565 and 3001-3262, 3325-3328, or an analog thereof with up to 1, 2, 3, 4, 5, 6, 7, 8, 9 or 10 amino acid modifications relative to any one of these SEQ ID NOs.

[0040] While the dipeptide prodrug, e.g. A-B, may be linked to Q at any position that interferes with the activity of Q, embodiments disclosed herein illustrate examples of positions that are suitable for linkage of A-B. When position numbers are named herein by referring to the position in the native glucagon sequence (SEQ ID NO: 701), the corresponding position in glucagon analogs or in other glucagon superfamily peptides can be determined by alignment. See, e.g., FIG. 6 which shows an alignment of certain glucagon superfamily peptides. For example, position 24 based on native glucagon corresponds to position 24 of (7-37) GLP-1.

[0041] In certain embodiments a glucagon superfamily peptide may comprise a C-terminus or a C-terminal amino acid sequence including but not limited to: COOH, CONH₂, GPSSGAPPPS (SEQ ID NO: 710), GPSSGAPPPS-CONH₂ (SEQ ID NO: 711), a oxyntomodulin carboxy terminal extension, KRNRNNIA (SEQ ID NO: 714) or KGKKNDWKHNITQ (SEQ ID NO: 713). Additional, C-terminal amino acid sequences for glucagon superfamily peptides are further detailed below.

[0042] In other aspects, Q comprises osteocalcin (SEQ ID NO: 709), or an amino acid sequence that is at least about 40%, 45%, 50%, 55%, 60%, 65%, 70%, 75%, 80%, 85%, 90%, or 95% identical to native osteocalcin over the length of the native peptide. Q may comprise an analog of osteocalcin with up to 1, 2, 3, 4, 5, 6, 7, 8, 9 or 10 amino acid modifications relative to native osteocalcin. In yet other aspects, Q comprises growth hormone releasing hormone (GHRH) (SEQ ID NO: 719), or an amino acid sequence that is at least about 40%, 45%, 50%, 55%, 60%, 65%, 70%, 75%, 80%, 85%, 90%, or 95% identical to native GHRH over the length of the native peptide. Q may comprise an analog of GHRH with up to 1, 2, 3, 4, 5, 6, 7, 8, 9 or 10 amino acid modifications relative to native GHRH. In some embodiments, Q may be any analog of osteocalcin or GHRH known in the art.

[0043] In some embodiments, only one prodrug moiety is linked to Q. For example, in such embodiments, when the prodrug moiety (A-B) is linked to Q at the N-terminus, there are no prodrug moieties (A-B) linked to an internal amino acid residue in the sequence of Q, and vice versa. In some embodiments, two or three prodrug moieties are linked to Q, e.g. at the N-terminus and at one or more internal sites.

[0044] The disclosure also provides a peptide prodrug comprising, or consisting of, any of SEQ ID NOs: 3272-3275, 3288-3291, 3305-3316, 3329, 3333, 3335, 3336 or 3337. The disclosure also provides an analog of any of these SEQ ID NOs: 3272-3275, 3288-3291, 3305-3316, 3329, 3333, 3335, 3336 or 3337, having 1, 2 or 3 amino acid substitutions, e.g. conservative amino acid substitutions, 1, 2 or 3 amino acid deletions, 1, 2 or 3 amino acid insertions internal to the peptide, and/or 1-21 amino acids added to the N-terminus or C-terminus, preferably collectively totaling up to 3, 4, 5, 6, 7, 8, 9 or 10 amino acid modifications relative to the parent sequence.

[0045] The disclosure further provides a peptide prodrug comprising, or consisting of, any of SEQ ID NOs: 3272-3292, 3298-3300, 3305-3316, 3329-3337, or an analog thereof having up to 3, 4, 5, 6, 7, 8, 9, or 10 modifications relative to the parent sequence.

### BRIEF DESCRIPTION OF THE DRAWINGS

[0046] FIG. 1 is a scheme showing synthesis of peptides of the invention. Reagents: (a) Sacrosine, DEPBT, DIEA (5 equiv), DMF, r.t., 1 h; (b) TFA, r.t., 1 min; (c) Boc-dLys(Fmoc), DEPBT, DIEA (5 equiv), DMF, r.t., overnight; (d) 20% piperidine/DMF, r.t., 30 min; (e) Stearic acid, DEPBT, DIEA 5 (equiv), 50% DMF/DCM, r.t., overnight; (f) TFA, r.t., 1 min; (g) 5% anisole/HF, 0° C., 1 h. The prodrug was synthesized with Boc solid-phase peptide strategy by using PAM resin. Sarcosine was coupled to the resin-bound peptide 1 to generate the resin-bound compound 2, then treated with TFA and coupled with Boc-dLys(Fmoc) to achieve resin-bound compound 3. Consequently, treated with 20% piperidine in DMF and coupled with fatty acid to obtain the final resin-bound prodrug 4. 4 was treated with TFA to remove t-Boc group on the N-terminus. At last the resin-bound compound 4 was cleaved from the support by hydrofluoric acid (HF) to the prodrug 5.

[0047] FIG. 2 is a graph showing the change in body weight in diet-induced obesity (DIO) mice injected intraperitoneally with a single dose of 10 or 50 nmol/kg of Peptide F, Peptide D, Peptide D with a C₁₈ acylated dipeptide prodrug moiety, Peptide D with a C₁₈ acylated lysine residue linked directly the 4-amino phenylalanine at position 10.

[0048] FIG. 3A is a graph showing the change in body weight in diet-induced obesity (DIO) mice injected intraperitoneally with a single dose of 10 nmol/kg of Peptide D, Peptide D with a C₁₈ acylated dipeptide prodrug moiety, Peptide D with a C₁₈ acylated lysine residue linked directly the 4-amino phenylalanine at position 10, Peptide D with a C₂₀ acylated dipeptide prodrug moiety, Peptide D with a C₂₀ acylated lysine residue linked directly the 4-amino phenylalanine at position 10, Peptide D with a C₂₂ acylated dipeptide prodrug moiety, and Peptide D with a C₂₂ acylated lysine residue linked directly the 4-amino phenylalanine at position 10. FIG. 3B is a graph showing the percent total change in body weight of the mice of FIG. 3A.

[0049] FIG. 4A is a graph showing the change in body weight in diet-induced obesity (DIO) mice injected intraperitoneally daily for five days with a single dose of 3 or 10 nmol/kg of Peptide D, Peptide D with a C₂₂ acylated dipeptide prodrug moiety, and Peptide D with a C₂₂ acylated lysine residue linked directly the 4-amino phenylalanine at position 10. FIG. 4B is a graph showing the percent total change in body weight of the mice of FIG. 4A.

[0050] FIG. 5 is a graph showing the change in body weight in diet-induced obesity

[0051] (DIO) mice injected intraperitoneally a single dose of 40 nmol/kg on day 0, a single dose of 20 nmol/kg on day 0 and day 2, or a single dose of 10 nmol/kg on days 0, 1, 2, and 3 of Peptide D or Peptide D with a C₂₂ acylated dipeptide prodrug moiety.

[0052] FIG. 6 is an alignment of glucagon superfamily peptides. When position numbers are named herein by referring to the position in the native glucagon sequence (SEQ ID NO: 701), the corresponding position in glucagon analogs or in other glucagon superfamily peptides can be determined by alignment.

### DETAILED DESCRIPTION

### Definitions

[0053] In describing and claiming the invention, the following terminology will be used in accordance with the definitions set forth below.

[0054] As used herein, the term “prodrug” is defined as any compound that undergoes chemical modification before exhibiting its full pharmacological effects.

[0055] As used herein the term “amino acid” encompasses any molecule containing both amino and carboxyl functional groups, wherein the amino and carboxylate groups are attached to the same carbon (the alpha carbon). The alpha carbon optionally may have one or two further organic substituents. An amino acid can be designated by its three letter code, one letter code, or in some cases by the name of its side chain. For example, an unnatural amino acid comprising a cyclohexane group attached to the alpha carbon is termed “cyclohexane” or “cyclohexyl.” For the purposes of the present disclosure designation of an amino acid without specifying its stereochemistry is intended to encompass either the L or D form of the amino acid, or a racemic mixture. However, in the instance where an amino acid is designated by its three letter code and includes a superscript number (i.e., Lys⁻¹), such a designation is intended to specify the native L form of the amino acid, whereas the D form will be specified by inclusion of a lower case d before the three letter code and superscript number (i.e., dLys⁻¹).

[0056] As used herein the term “hydroxyl acid” refers to an amino acid that has been modified to replace the alpha carbon amino group with a hydroxyl group.

[0057] As used herein the term “non-coded amino acid” encompasses any amino acid that is not an L-isomer of any of the following 20 amino acids: Ala, Cys, Asp, Glu, Phe, Gly, His, Ile, Lys, Leu, Met, Asn, Pro, Gln, Arg, Ser, Thr, Val, Trp, Tyr.

[0058] A “dipeptide” is the result of the linkage of an α-amino acid or α-hydroxyl acid to another amino acid, through a peptide bond.

[0059] As used herein the term “chemical cleavage” absent any further designation encompasses a non-enzymatic reaction that results in the breakage of a covalent chemical bond.

[0060] A “bioactive polypeptide” refers to polypeptides which are capable of exerting a biological effect in vitro and/or in vivo.

[0061] As used herein an “acylated” amino acid is an amino acid comprising an acyl group which is non-native to a naturally-occurring amino acid, regardless by the means by which it is produced. Exemplary methods of producing acylated amino acids and acylated peptides are known in the art and include acylating an amino acid before inclusion in the peptide or peptide synthesis followed by chemical acylation of the peptide.

[0062] As used herein, an “alkylated” amino acid is an amino acid comprising an alkyl group which is non-native to a naturally-occurring amino acid, regardless of the means by which it is produced. Exemplary methods of producing alkylated amino acids and alkylated peptides are known in the art and including alkylating an amino acid before inclusion in the peptide or peptide synthesis followed by chemical alkylation of the peptide.

[0063] As used herein a general reference to a peptide is intended to encompass peptides that have modified amino and carboxy termini. For example, an amino acid sequence designating the standard amino acids is intended to encompass standard amino acids at the N- and C-terminus as well as a corresponding hydroxyl acid at the N-terminus and/or a corresponding C-terminal amino acid modified to comprise an amide group in place of the terminal carboxylic acid.

[0064] As used herein, the term “pharmaceutically acceptable carrier” includes any of the standard pharmaceutical carriers, such as a phosphate buffered saline solution, water, emulsions such as an oil/water or water/oil, and various types of wetting agents. The term also encompasses any of the agents approved by a regulatory agency of the US Federal government or listed in the US Pharmacopeia for use in animals, including humans.

[0065] As used herein the term “pharmaceutically acceptable salt” refers to salts of compounds that retain the biological activity of the parent compound, and which are not biologically or otherwise undesirable. Many of the compounds disclosed herein are capable of forming acid and/or base salts by virtue of the presence of amino and/or carboxyl groups or groups similar thereto.

[0066] Pharmaceutically acceptable base addition salts can be prepared from inorganic and organic bases. Salts derived from inorganic bases, include by way of example only, sodium, potassium, lithium, ammonium, calcium and magnesium salts. Salts derived from organic bases include, but are not limited to, salts of primary, secondary and tertiary amines.

[0067] Pharmaceutically acceptable acid addition salts may be prepared from inorganic and organic acids. Salts derived from inorganic acids include hydrochloric acid, hydrobromic acid, sulfuric acid, nitric acid, phosphoric acid, and the like. Salts derived from organic acids include acetic acid, propionic acid, glycolic acid, pyruvic acid, oxalic acid, malic acid, malonic acid, succinic acid, maleic acid, fumaric acid, tartaric acid, citric acid, benzoic acid, cinnamic acid, mandelic acid, methanesulfonic acid, ethanesulfonic acid, p-toluene-sulfonic acid, salicylic acid, and the like.

[0068] As used herein, the term “treating” includes prophylaxis of the specific disorder or condition, or alleviation of the symptoms associated with a specific disorder or condition and/or preventing or eliminating said symptoms. For example, as used herein the term “treating diabetes” will refer in general to maintaining glucose blood levels near normal levels and may include increasing or decreasing blood glucose levels depending on a given situation.

[0069] As used herein an “effective” amount or a “therapeutically effective amount” of a prodrug refers to a nontoxic but sufficient amount of the prodrug to provide the desired effect. For example one desired effect would be the prevention or treatment of hyperglycemia. The amount that is “effective” will vary from subject to subject, depending on the age and general condition of the individual, mode of administration, and the like. Thus, it is not always possible to specify an exact “effective amount.” However, an appropriate “effective” amount in any individual case may be determined by one of ordinary skill in the art using routine experimentation.

[0070] The term, “parenteral” means not through the alimentary canal but by some other route such as subcutaneous, intramuscular, intraspinal, or intravenous.

[0071] The term “identity” as used herein relates to the similarity between two or more sequences. Identity is measured by dividing the number of identical residues by the total number of residues and multiplying the product by 100 to achieve a percentage. Thus, two copies of exactly the same sequence have 100% identity, whereas two sequences that have amino acid deletions, additions, or substitutions relative to one another have a lower degree of identity. Those skilled in the art will recognize that several computer programs, such as those that employ algorithms such as BLAST (Basic Local Alignment Search Tool, Altschul et al. (1993) J. Mol. Biol. 215:403-410) are available for determining sequence identity.

[0072] The term “glucagon related peptide” refers to those peptides which have biological activity (as agonists or antagonists) at any one or more of the glucagon, GLP-1, GLP-2, and GIP receptors and comprise an amino acid sequence that shares at least 40% sequence identity (e.g., 45%, 50%, 55%, 60%, 65%, 70%, 75%, 80%, 85%, 90%, 95%) with at least one of native glucagon, native oxyntomodulin, native exendin-4, native GLP-1, native GLP-2, or native GIP. Unless otherwise stated, any reference to an amino acid position in a glucagon related peptide (e.g. for linkage of a prodrug moiety, a conjugate moiety, a hydrophilic polymer, acylation or alkylation) refers to the position relative to the native glucagon amino acid sequence (SEQ ID NO: 701).

[0073] The term “glucagon superfamily peptide” refers to a group of peptides related in structure in their N-terminal and C-terminal regions (see, for example, Sherwood et al., Endocrine Reviews 21: 619-670 (2000)). Members of this group include all glucagon related peptides, as well as Growth Hormone Releasing Hormone (GHRH; SEQ ID NO: 719), vasoactive intestinal peptide (VIP; SEQ ID NO: 720), pituitary adenylate cyclase-activating polypeptide 27 (PACAP-27; SEQ ID NO: 721), peptide histidine isoleucine (PHI), peptide histidine methionine (PHM; SEQ ID NO: 722), Secretin (SEQ ID NO: 723), and analogs, derivatives or conjugates with up to 1, 2, 3, 4, 5, 6, 7, 8, 9 or 10 amino acid modifications relative to the native peptide. Such peptides preferably retain the ability to interact (agonist or antagonist) with receptors of the glucagon receptor superfamily. Unless otherwise stated, any reference to an amino acid position in a glucagon superfamily peptide (e.g. for linkage of a prodrug moiety, a conjugate moiety, a hydrophilic polymer, acylation or alkylation) refers to the position relative to the native glucagon amino acid sequence (SEQ ID NO: 701), see FIG. 10 for an alignment of representative glucagon superfamily peptides.

[0074] The term “GLP-1 agonist” refers to a compound that stimulates GLP-1 receptor activity, as measured by cAMP production using a validated in vitro model assay, such as that described in Example 13 of published International Application No. WO 2007/056362, published on May 18, 2007, the disclosure of which is hereby expressly incorporated by reference into the present application.

[0075] As used herein the term “native GLP-1” is a generic term that designates GLP-1(7-36)amide (consisting of the sequence of SEQ ID NO: 704), GLP-1(7-37)acid (consisting of the sequence of SEQ ID NO: 703) or a mixture of those two compounds. As used herein, a general reference to “GLP-1” in the absence of any further designation is intended to mean native GLP-1.

[0076] As used herein the term “glucagon peptide” is a generic term that designates the natural glucagon peptide of SEQ ID NO: 701 as well as modified derivatives having one or more amino acid modifications relative to the native glucagon sequence, optionally including but not limited to substitutions at amino acid positions 1, 2, 5, 7, 8, 10, 12, 13, 14, 16, 17, 18, 24, 28 and 29. Generally, all references to a particular amino acid position by number (e.g. position 28) refer to the amino acid at that position in native glucagon (SEQ ID NO: 701) or the corresponding amino acid position in any analogs thereof. For example, a reference to “position 28” would mean the corresponding position 27 for a glucagon analog in which the first amino acid of SEQ ID NO: 701 has been deleted. Similarly, a reference to “position 28” would mean the corresponding position 29 for a glucagon analog in which one amino acid has been added before the N-terminus of SEQ ID NO: 701.

[0077] As used herein the term “GLP-1 peptide” is a generic term that designates native GLP-1 as well as modified derivatives having one or more amino acid modifications relative to the native GLP-1 sequence.

[0078] As used herein an amino acid “modification” refers to a substitution, addition or deletion of an amino acid, and includes substitution with, or addition of, any of the 20 amino acids commonly found in human proteins, as well as unusual or non-naturally occurring amino acids. Commercial sources of unusual amino acids include Sigma-Aldrich (Milwaukee, Wis.), ChemPep Inc. (Miami, Fla.), and Genzyme Pharmaceuticals (Cambridge, Mass.). Unusual amino acids may be purchased from commercial suppliers, synthesized de novo, or chemically modified or derivatized from naturally occurring amino acids. Amino acid modifications include linkage of an amino acid to a conjugate moiety, such as a hydrophilic polymer, acylation, alkylation, and/or other chemical derivatization of an amino acid.

[0079] As used herein an amino acid “substitution” refers to the replacement of one amino acid residue by a different amino acid residue.

[0080] As used herein, the term “conservative amino acid substitution” is defined herein as the substitution of one amino acid with another amino acid having similar properties, e.g., size, charge, hydrophobicity, hydrophilicity, and/or aromaticity, and includes exchanges within one of the following five groups:

[0081] I. Small aliphatic, nonpolar or slightly polar residues:
[0082] Ala, Ser, Thr, Pro, Gly;

[0083] II. Polar, negatively charged residues and their amides and esters:
[0084] Asp, Asn, Glu, Gln, cysteic acid and homocysteic acid;

[0085] III. Polar, positively charged residues:
[0086] His, Arg, Lys; Ornithine (Orn)

[0087] IV. Large, aliphatic, nonpolar residues:
[0088] Met, Leu, Ile, Val, Cys, Norleucine (Nle), homocysteine

[0089] V. Large, aromatic residues:
[0090] Phe, Tyr, Trp, acetyl phenylalanine

[0091] As used herein the term “Chimera 2” refers to a glucagon peptide wherein the native glucagon amino acid sequence (SEQ ID NO: 701) comprising the following modifications: Gln at position 17, Ala at position 18, Lys at position 20, Glu at position 21, Ile at position 23, and Ala at position 24, and a C-terminal amide.

[0092] As used herein the general term “polyethylene glycol chain” or “PEG chain”, refers to mixtures of condensation polymers of ethylene oxide and water, in a branched or straight chain, represented by the general formula H(OCH₂CH₂)ₖOH, wherein k is at least 9. Absent any further characterization, the term is intended to include polymers of ethylene glycol with an average total molecular weight selected from the range of 500 to 80,000 Daltons. “Polyethylene glycol chain” or “PEG chain” is used in combination with a numeric suffix to indicate the approximate average molecular weight thereof. For example, PEG-5,000 (5 k PEG) refers to polyethylene glycol chain having a total molecular weight average of about 5,000 Daltons.

[0093] As used herein the term “pegylated” and like terms refers to a compound that has been modified from its native state by linking a polyethylene glycol chain to the compound. A “pegylated polypeptide” is a polypeptide that has a PEG chain covalently bound to the polypeptide.

[0094] As used herein a “linker” is a bond, molecule or group of molecules that binds two separate entities to one another. Linkers may provide for optimal spacing of the two entities or may further supply a labile linkage that allows the two entities to be separated from each other. Labile linkages include photocleavable groups, acid-labile moieties, base-labile moieties and enzyme-cleavable groups.

[0095] As used herein a “dimer” is a complex comprising two subunits covalently bound to one another via a linker. The term dimer, when used absent any qualifying language, encompasses both homodimers and heterodimers. A homodimer comprises two identical subunits, whereas a heterodimer comprises two subunits that differ, although the two subunits are substantially similar to one another.

[0096] The term “C₁-Cₙ alkyl” wherein n can be from 1 through 6, as used herein, represents a branched or linear alkyl group having from one to the specified number of carbon atoms. Typical C₁-C₆ alkyl groups include, but are not limited to, methyl, ethyl, n-propyl, iso-propyl, butyl, iso-butyl, sec-butyl, tert-butyl, pentyl, hexyl and the like.

[0097] The terms “C₂-Cₙ alkenyl” wherein n can be from 2 through 6, as used herein, represents an olefinically unsaturated branched or linear group having from 2 to the specified number of carbon atoms and at least one double bond. Examples of such groups include, but are not limited to, 1-propenyl, 2-propenyl (—CH₂—CH═CH₂), 1,3-butadienyl, (—CH═CHCH═CH₂), 1-butenyl (—CH═CHCH₂CH₃), hexenyl, pentenyl, and the like.

[0098] The term “C₂-Cₙ alkynyl” wherein n can be from 2 to 6, refers to an unsaturated branched or linear group having from 2 to n carbon atoms and at least one triple bond. Examples of such groups include, but are not limited to, 1-propynyl, 2-propynyl, 1-butynyl, 2-butynyl, 1-pentynyl, and the like.

[0099] As used herein the term “aryl” refers to a mono- or bicyclic carbocyclic ring system having one or two aromatic rings including, but not limited to, phenyl, naphthyl, tetrahydronaphthyl, indanyl, indenyl, and the like. The size of the aryl ring and the presence of substituents or linking groups are indicated by designating the number of carbons present. For example, the term “(C₁-C₃ alkyl)(C₆-C₁₀ aryl)” refers to a 6 to 10 membered aryl that is attached to a parent moiety via a one to three membered alkyl chain.

[0100] The term “heteroaryl” as used herein refers to a mono- or bicyclic ring system containing one or two aromatic rings and containing at least one nitrogen, oxygen, or sulfur atom in an aromatic ring. The size of the heteroaryl ring and the presence of substituents or linking groups are indicated by designating the number of carbons present. For example, the term “(C₁-Cₙ alkyl)(C₅-C₆ heteroaryl)” refers to a 5 or 6 membered heteroaryl that is attached to a parent moiety via a one to “n” membered alkyl chain.

[0101] As used herein, the term “heteroalkyl” refers to a linear or branched hydrocarbon containing the indicated number of carbon atoms and at least one heteroatom in the backbone of the structure. Suitable heteroatoms for purposes herein include but are not limited to N, S, and O.

[0102] As used herein, the term “halo” refers to one or more members of the group consisting of fluorine, chlorine, bromine, and iodine.

[0103] As used herein the term “charged amino acid” refers to an amino acid that comprises a side chain that is negatively charged (i.e., deprotonated) or positively charged (i.e., protonated) in aqueous solution at physiological pH. For example negatively charged amino acids include aspartic acid, glutamic acid, cysteic acid, homocysteic acid, and homoglutamic acid, whereas positively charged amino acids include arginine, lysine and histidine. Charged amino acids include the charged amino acids among the 20 amino acids commonly found in human proteins, as well as atypical or non-naturally occurring amino acids.

[0104] As used herein the term “acidic amino acid” refers to an amino acid that comprises a second acidic moiety (i.e. other than the α-carboyxl group that all amino acids possess), including for example, a carboxylic acid or sulfonic acid group.

[0105] As used herein the term “patient” without further designation is intended to encompass any warm blooded vertebrate domesticated animal (including for example, but not limited to livestock, horses, cats, dogs and other pets), mammals, and humans.

### Embodiments

[0106] The present disclosure describes the formulation of prodrug derivatives of bioactive polypeptides useful for treating a disease, e.g., diabetes, obesity. More particularly, the prodrugs disclosed herein are formulated to enhance the half life of the parent bioactive peptide or protein, while allowing for subsequent activation of the prodrug via a non-enzymatic degradation mechanism. The ideal prodrug should be soluble in water at physiological conditions (for example, a pH of 7.2 and 37° C.), and it should be stable in the powder form for long term storage. It should also be immunologically silent and exhibit a low activity relative to the parent drug. In some embodiments, the prodrug will exhibit no more than 10% of the activity of the parent drug. In some embodiments the prodrug exhibits less than about 10%, less than about 5%, about 1%, or less than about 1% activity relative to the parent drug. Furthermore, the prodrug, when injected in the body, should be quantitatively converted to the active drug within a defined period of time.

[0107] Disclosed herein are examples of prodrugs of a known bioactive polypeptide that have a selection of structural features that together provide a significantly extended “non-enzymatic activation half life” (cleavage half-life) in PBS or serum, under physiological conditions, of at least 5 days to about a week. Similar peptides having extended half-life of at least 3 days, for example, to 10 days, for example, can be prepared.

[0108] With respect to half-life in PBS or serum, physiological conditions as disclosed herein are intended to include a temperature of about 35 to 40° C. and a pH of about 7.0 to about 7.4 and more typically include a pH of 7.2 to 7.4 and a temperature of 36 to 38° C. The examples disclosed herein show that an extended cleavage half-life in PBS or serum correlates with a prolonged action in vivo.

[0109] Without being bound by a theory of the invention, activation of the prodrug occurs after formation of a diketopiperazine or diketomorpholine, self-cleavage of the amide bond linked acylated/alkylated dipeptide, and release of the active polypeptide drug. Thus, the dipeptide prodrug element is designed to cleave based upon an intramolecular chemical reaction that is not dependent upon additional chemical additives, or enzymes. Preferably, the dipeptide structure is selected to resist cleavage by peptidases present in mammalian sera, including for example dipeptidyl peptidase IV (DPP-IV).

[0110] In accordance with some embodiments the prodrugs disclosed can be co-administered with a protease inhibitor, including a specific DPP-IV inhibitor (e.g., Januvia®, Merck & Co, Inc), as a means of delaying activation of the prodrug. In this embodiment the amino acids of the prodrug element are selected so the dipeptide is an acceptable substrate for DPP-IV cleavage. The protease inhibitor can be administered in a single composition or separate compositions. When administered as separate compositions, the protease inhibitor is typically administered within 1-5 hours, 1-2 hours, 30 minutes, or 10 minutes of administration of the prodrug. In some embodiments the two separate compositions are administered immediately one after the other.

[0111] In accordance with some embodiments the dipeptide prodrug element can be further modified to comprise a hydrophilic moiety. In some embodiments the hydrophilic moiety is a polyethylene glycol chain. In accordance with some embodiments a polyethylene glycol chain of 40 k or higher is covalently bound to the side chain of the A or B amino acid of the dipeptide prodrug element.

### Linkage of A-B to an Acyl or Alkyl Group

[0112] In some or any aspects, the acyl or alkyl group is linked via the dipeptide moiety A-B to an amino acid located at any of positions 1 (N-terminus), 9, 10, 11, 12, 13, 14, 15, 16, 17, 18, 19, 20, 37, 38, 39, 40, 41, 42, or 43 (or within the C-terminal 5 amino acids) of the glucagon superfamily peptide. In exemplary aspects, the peptide amino acid is located at any of positions 9, 10, 12, 16, 20, or 40 of the glucagon superfamily peptide or at any of positions 10, 13, 14, 16, 17, or 40 of the glucagon superfamily peptide.

[0113] Attachment of A-B

[0114] In some embodiments, A-B is linked to an amino acid of Formula I:

[chemical structure]

In some embodiments, the amino acid of Formula I, is the amino acid wherein n is 4 (Lys) or n is 3 (Orn).

[0115] Attachment of Acyl or Alkyl Group

[0116] In some embodiments, the acyl group is linked to an amino acid of the dipeptide A-B via an ester, thioester, or amide linkage, or the alkyl group is linked to an amino acid of the dipeptide A-B via an ether, thioether or amine linkage.

[0117] For example, the linkage can occur upon acylation of an amine, hydroxyl, or thiol of a side chain of amino acid A of the dipeptide A-B.

[0118] Alternatively, linkage of an alkyl group can occur upon alkylation of an amine, hydroxyl, or thiol of a side chain of amino acid A of the dipeptide A-B. In some or any embodiments, the alkyl group is linked by reacting the amine, hydroxyl, or thiol with an activated alkyl group. Alkyl groups in some aspects are activated with a leaving group, for example, a halogen, sulfonate ester, pyridylthiol, ammonium salt, or phenoxyl.

[0119] The linkage between A-B and the acyl or alkyl group can also occur via a spacer. In some embodiments, the spacer is a hydrophilic bifunctional spacer, a small PEG moiety, or a hydrophobic bifunctional spacer. In exemplary embodiments, the hydrophilic bifunctional spacer comprises two or more reactive groups, e.g., an amine, a hydroxyl, a thiol, and a carboxyl group or any combinations thereof. In exemplary embodiments, the hydrophilic bifunctional spacer comprises a hydroxyl group and a carboxylate. In other embodiments, the hydrophilic bifunctional spacer comprises an amine group and a carboxylate. In other embodiments, the hydrophilic bifunctional spacer comprises a thiol group and a carboxylate. In a specific embodiment, the spacer comprises an amino poly(alkyloxy)carboxylate. In this regard, the spacer can comprise, for example, NH₂(CH₂CH₂O)ₙ(CH₂)ₘCOOH, wherein m is any integer from 1 to 6 and n is any integer from 2 to 12, such as, e.g., 8-amino-3,6-dioxaoctanoic acid, which is commercially available from Peptides International, Inc. (Louisville, Ky.).

[0120] In exemplary embodiments, the spacer comprises a small polyethylene glycol moiety (PEG) comprising a structure [—O—CH₂—CH₂—]ₙ, wherein n is an integer between 2 and 16, (e.g., 2, 3, 4, 5, 6, 7, 8, 9, 10, 11, 12, 13, 14, 15, 16). Such small PEGs are referred to herein as a “miniPEG.” In exemplary aspects, the miniPEG is a functionalized miniPEG comprising one or more functional groups. Suitable functional groups include, but are not limited to, an amine, a hydroxyl, a thiol, and a carboxyl group or any combinations thereof. In exemplary aspects, the miniPEG is a miniPEG acid comprising a structure {[—O—CH₂—CH₂—]ₙ—COO—}, wherein n is defined as above. In exemplary aspects, the miniPEG is an amido miniPEG comprising a structure {—N—CH₂—CH₂—[—O—CH₂—CH₂—]ₙ}, wherein n is defined as above. In exemplary aspects, the miniPEG is an amido miniPEG acid comprising a structure {—N—CH₂—CH₂—[—O—CH₂—CH₂—]ₙ—COO—}, wherein n is defined as above. Suitable reagents for use in acylating an amino acid with a miniPEG are commercially available from vendors, such as Peptides International (Louisville, Ky.). Also, suitable techniques for acylating an amino acid with a miniPEG are described herein (see Example 1).

[0121] In some embodiments, the spacer is a hydrophobic bifunctional spacer. Hydrophobic bifunctional spacers are known in the art. See, e.g., Bioconjugate Techniques, G. T. Hermanson (Academic Press, San Diego, Calif., 1996), which is incorporated by reference in its entirety. In exemplary embodiments, the hydrophobic bifunctional spacer comprises two or more reactive groups, e.g., an amine, a hydroxyl, a thiol, and a carboxyl group or any combinations thereof. In exemplary embodiments, the hydrophobic bifunctional spacer comprises a hydroxyl group and a carboxylate. In other embodiments, the hydrophobic bifunctional spacer comprises an amine group and a carboxylate. In other embodiments, the hydrophobic bifunctional spacer comprises a thiol group and a carboxylate. Suitable hydrophobic bifunctional spacers comprising a carboxylate and a hydroxyl group or a thiol group are known in the art and include, for example, 8-hydroxyoctanoic acid and 8-mercaptooctanoic acid.

[0122] In accordance with some or any of the foregoing embodiments, the bifunctional spacer can be a synthetic or naturally occurring amino acid (including, but not limited to, any of those described herein) comprising an amino acid backbone that is 3 to 10 atoms in length (e.g., 6-amino hexanoic acid, 5-aminovaleric acid, 7-aminoheptanoic acid, and 8-aminooctanoic acid). Alternatively, the spacer can be a dipeptide or tripeptide spacer having a peptide backbone that is 3 to 10 atoms (e.g., 6 to 10 atoms) in length. Each amino acid of the dipeptide or tripeptide spacer can be the same as or different from the other amino acid(s) of the dipeptide or tripeptide and can be independently selected from the group consisting of: naturally-occurring or coded and/or non-coded or non-naturally occurring amino acids, including, for example, any of the D or L isomers of the naturally-occurring amino acids (Ala, Cys, Asp, Glu, Phe, Gly, His, Ile, Lys, Leu, Met, Asn, Pro, Arg, Ser, Thr, Val, Trp, Tyr), or any D or L isomers of the non-naturally occurring or non-coded amino acids selected from the group consisting of: β-alanine (β-Ala), N-α-methyl-alanine (Me-Ala), aminobutyric acid (Abu), γ-aminobutyric acid (γ-Abu), aminohexanoic acid (ε-Ahx), aminoisobutyric acid (Aib), aminomethylpyrrole carboxylic acid, aminopiperidinecarboxylic acid, aminoserine (Ams), aminotetrahydropyran-4-carboxylic acid, arginine N-methoxy-N-methyl amide, β-aspartic acid (β-Asp), azetidine carboxylic acid, 3-(2-benzothiazolyl)alanine, α-tert-butylglycine, 2-amino-5-ureido-n-valeric acid (citrulline, Cit), β-Cyclohexylalanine (Cha), acetamidomethyl-cysteine, diaminobutanoic acid (Dab), diaminopropionic acid (Dpr), dihydroxyphenylalanine (DOPA), dimethylthiazolidine (DMTA), γ-Glutamic acid (γ-Glu), homoserine (Hse), hydroxyproline (Hyp), isoleucine N-methoxy-N-methyl amide, methyl-isoleucine (MeIle), isonipecotic acid (Isn), methyl-leucine (MeLeu), methyl-lysine, dimethyl-lysine, trimethyl-lysine, methanoproline, methionine-sulfoxide (Met(O)), methionine-sulfone (Met(O)₂), norleucine (Nle), methyl-norleucine (Me-Nle), norvaline (Nva), ornithine (Orn), para-aminobenzoic acid (PABA), penicillamine (Pen), methylphenylalanine (MePhe), 4-Chlorophenylalanine (Phe(4-Cl)), 4-fluorophenylalanine (Phe(4-F)), 4-nitrophenylalanine (Phe(4-NO₂)), 4-cyanophenylalanine ((Phe(4-CN)), phenylglycine (Phg), piperidinylalanine, piperidinylglycine, 3,4-dehydroproline, pyrrolidinylalanine, sarcosine (Sar), selenocysteine (Sec), O-Benzyl-phosphoserine, 4-amino-3-hydroxy-6-methylheptanoic acid (Sta), 4-amino-5-cyclohexyl-3-hydroxypentanoic acid (ACHPA), 4-amino-3-hydroxy-5-phenylpentanoic acid (AHPPA), 1,2,3,4,-tetrahydro-isoquinoline-3-carboxylic acid (Tic), tetrahydropyranglycine, thienylalanine (Thi), O-benzyl-phosphotyrosine, O-Phosphotyrosine, methoxytyrosine, ethoxytyrosine, O-(bis-dimethylamino-phosphono)-tyrosine, tyrosine sulfate tetrabutylamine, methyl-valine (MeVal), and alkylated 3-mercaptopropionic acid. In exemplary aspects, the spacer is a Cys residue or a Lys residue.

[0123] In some embodiments, the spacer comprises an overall negative charge, e.g., comprises one or two negative-charged amino acids.

### Acyl Groups

[0124] The acyl group of the acylated amino acid is preferably C16 or longer. For example, the acyl group can be any of a C16 fatty acid, C18 fatty acid, C20 fatty acid, C22 fatty acid, C24 fatty acid, C26 fatty acid, C28 fatty acid, or a C30 fatty acid. In some embodiments, the acyl group is a C16 to C30 fatty acid or a C20 to C28 fatty acid.

[0125] In an alternative embodiment, the acyl group is a bile acid. The bile acid can be any suitable bile acid, including, but not limited to, cholic acid, chenodeoxycholic acid, deoxycholic acid, lithocholic acid, taurocholic acid, glycocholic acid, and cholesterol acid.

[0126] In exemplary embodiments, the acyl group is a succinic acid or a succinic acid derivative. By “succinic acid derivative” as used herein is meant a compound comprising a substituted succinic acid or a substituted cyclic succinic acid (i.e., succinic anhydride) or a substituted expanded ring succinic anhydride, (i.e. a 6-8 membered ring comprising the —C(O)—O—C(O)— moiety and 3 to 5 additional carbons), wherein the substituted succinic acid, substituted cyclic succinic acid (i.e., succinic anhydride), or substituted expanded ring succinic anhydride is substituted with one or more alkyl chains or one or more functionalized carbon chains.

[0127] In exemplary aspects, the succinic acid derivative comprises a structure of Formula V:

[chemical structure]

wherein each of R and R′ is independently H, a linear or branched C16-C30 carbon chain, or a linear or branched C16-C30 functionalized carbon chain. In exemplary embodiments, R and/or R′ is a carbon chain comprising a C16 to C30 alkyl chain, e.g. C16 alkyl, C18 alkyl, C20 alkyl, C22 alkyl, C24 alkyl, C26 alkyl, C28 alkyl, or a C30 alkyl. In exemplary aspects, the functionalized carbon chain comprises a functional group, including, but not limited, carboxyl, sulfhydryl, amine, ketyl, sulfoxyl or amido.

[0128] In exemplary aspects, the succinic acid derivative comprises a succinic anhydride comprising a structure of Formula VI:

[chemical structure]

wherein each of R and R′ is independently H, a linear or branched C16-C30 carbon chain, or a linear or branched C16-C30 functionalized carbon chain. In exemplary embodiments, R and/or R′ is a carbon chain comprising a C16 to C30 alkyl chain. For example, the alkyl group can be any of a C16 alkyl, C18 alkyl, C20 alkyl, C22 alkyl, C24 alkyl, C26 alkyl, C28 alkyl, or a C30 alkyl. In exemplary aspects, the functionalized carbon chain comprises a functional group, including, but not limited, carboxyl, sulfhydryl, amine, ketyl, sulfoxyl or amido.

[0129] In exemplary aspects, the succinic acid derivative is a succinic anhydride derivative, including those of Formula VII:

[chemical structure]

[0130] wherein n is 1-4, and
   wherein each of R and R′ is independently H, a linear or branched C16-C30 carbon chain, or a linear or branched C16-C30 functionalized carbon chain. In exemplary embodiments, R and/or R′ is a carbon chain comprising a C16 to C30 alkyl chain. For example, the alkyl group can be any of a C16 alkyl, C18 alkyl, C20 alkyl, C22 alkyl, C24 alkyl, C26 alkyl, C28 alkyl, or a C30 alkyl. In exemplary aspects, the functionalized carbon chain comprises a functional group, including, but not limited, carboxyl, sulfhydryl, amine, ketyl, sulfoxyl or amido.

[0131] When only one of R and R′ of Formulae V-VI is H, the acylated amino acid is referred to as “Cx Succinoyl.” As used herein, the term “Cx Succinoyl,” wherein x is an integer, refers to a structure wherein R is an alkyl chain of y carbons and y=x−1, and y does not include the carbons of succinoyl moiety. For example a structure of Formula VI wherein R is a C15 alkyl group and R′ is a H is referred to as C16 Succinoyl. When neither R nor R′ of Formulae V-VI is H, then the acylated amino acid is referred to as “Cx,Cx′ Succinoyl.” As used herein, the term “Cx,Cx′ Succinoyl,” wherein x and x′ are integers, refers to a structure wherein R is an alkyl chain of y carbons and R′ is an alkyl chain of y′ carbons, and y′=x′−1. For example, a structure of Formula VI wherein R is a C15 alkyl group and R′ is a C13 alkyl group is referred to as C16,C14 succinoyl. When the succinic acid derivative is a substituted expanded ring succinic anhydride and neither R nor R′ of Formula VII is H, then the acylated amino acid is referred to as “Cx,Cx′-n-Succinoyl.” As used herein, the term “Cx,Cx′-n-Succinoyl,” wherein x, x′, and n are integers, refers to a structure wherein R is an alkyl chain of y carbons, R′ is an alkyl chain of y′ carbons, and the succinic anhydride ring is extend by n carbons. For example, a structure of Formula VII wherein R and R′ are C15 alkyl groups and n=2 is referred to as C16,C16-2-Succinoyl.

[0132] In exemplary embodiments, the acyl group is a maleic acid or a maleic acid derivative. By “maleic acid derivative” as used herein is meant a compound comprising a substituted maleic acid or a substituted cyclic maleic acid (i.e., maleic anhydride) or a substituted expanded ring maleic anhydride, (i.e. a 6-8 membered ring comprising the —C(O)—O—C(O)— moiety and 3 to 5 additional carbons), wherein the substituted maleic acid, substituted cyclic maleic acid (i.e., maleic anhydride), or substituted expanded ring maleic anhydride is substituted with one or more alkyl chains or one or more functionalized carbon chains.

[0133] In exemplary aspects, the maleic acid derivative comprises a structure of Formula VIII:

[chemical structure]

wherein each of R and R′ is independently H, a linear or branched C16-C30 carbon chain, or a linear or branched C16-C30 functionalized carbon chain. In exemplary embodiments, R and/or R′ is a carbon chain comprising a C16 to C30 alkyl chain. For example, the alkyl group can be any of a C16 alkyl, C18 alkyl, C20 alkyl, C22 alkyl, C24 alkyl, C26 alkyl, C28 alkyl, or a C30 alkyl. In exemplary aspects, the functionalized carbon chain comprises a functional group, including, but not limited, carboxyl, sulfhydryl, amine, ketyl, sulfoxyl or amido.

[0134] In exemplary aspects, the maleic acid derivative comprises a maleic anhydride comprising a structure of Formula IX:

[chemical structure]

wherein each of R and R′ is independently H, a linear or branched C16-C30 carbon chain, or a linear or branched C16-C30 functionalized carbon chain. In exemplary embodiments, R and/or R′ is a carbon chain comprising a C16 to C30 alkyl chain. For example, the alkyl group can be any of a C16 alkyl, C18 alkyl, C20 alkyl, C22 alkyl, C24 alkyl, C26 alkyl, C28 alkyl, or a C30 alkyl. In exemplary aspects, the functionalized carbon chain comprises a functional group, including, but not limited, carboxyl, sulfhydryl, amine, ketyl, sulfoxyl or amido.

[0135] In exemplary aspects, the maleic acid derivative is a maleic anhydride derivative, including those of Formula X:

[chemical structure]

[0136] wherein n is 1-4, there is at least one C═C double bond between two non-carbonyl carbons, and
   wherein each of R and R′ is independently H, a linear or branched C16-C30 carbon chain, or a linear or branched C16-C30 functionalized carbon chain. In exemplary embodiments, R and/or R′ is a carbon chain comprising a C16 to C30 alkyl chain. For example, the alkyl group can be any of a C16 alkyl, C18 alkyl, C20 alkyl, C22 alkyl, C24 alkyl, C26 alkyl, C28 alkyl, or a C30 alkyl. In exemplary aspects, the functionalized carbon chain comprises a functional group, including, but not limited, carboxyl, sulfhydryl, amine, ketyl, sulfoxyl or amido.

[0137] When only one of R and R′ of Formulae VIII-IX is H, the acylated amino acid is referred to as “Cx Maleoyl.” As used herein, the term “Cx Maleoyl,” wherein x is an integer, refers to a structure wherein R is an alkyl chain of y carbons and y=x−1, and y does not include the carbons of maleoyl moiety. For example a structure of Formula IX wherein R is a C15 alkyl group and R′ is a H is referred to as C16 Maleoyl. When neither R nor R′ of Formulae VIII-IX is H, then the acylated amino acid is referred to as “Cx,Cx′ Maleoyl.” As used herein, the term “Cx,Cx′ Maleoyl,” wherein x and x′ are integers, refers to a structure wherein R is an alkyl chain of y carbons and R′ is an alkyl chain of y′ carbons and y′=x′−1. For example, a structure of Formula IX wherein R is a C15 alkyl group and R′ is a C13 alkyl group is referred to as C16,C14 maleoyl. When the maleic acid derivative is a substituted expanded ring maleic anhydride and neither R nor R′ of Formula X is H, then the acylated amino acid is referred to as “Cx,Cx′-n-Maleoyl.” As used herein, the term “Cx,Cx′-n-Maleoyl,” wherein x, x′, and n are integers, refers to a structure wherein R is an alkyl chain of y carbons, R′ is an alkyl chain of y′ carbons, and the maleic anhydride ring is extend by n carbons. For example, a structure of Formula X wherein R and R′ are C15 alkyl groups and n=2 is referred to as C16,C16-2-Maleoyl.

### Alkyl Group

[0138] The non-native alkyl group of the alkylated amino acid can be of any size, e.g., any length carbon chain, and can be linear or branched. In some specific embodiments, the alkyl group is a C16 to C30 alkyl. For example, the alkyl group can be any of a C16 alkyl, C18 alkyl, C20 alkyl, C22 alkyl, C24 alkyl, C26 alkyl, C28 alkyl, or a C30 alkyl.

[0139] In exemplary embodiments, the non-native alkyl group of the alkylated amino acid comprises a functional group, including, but not limited, carboxy, sulfhydryl, amine, ketyl, sulfoxyl or amido.

[0140] In exemplary embodiments, the non-native alkyl group is a carboxy-functionalized carbon chain of structure -Cx-COOH, wherein x is an integer, optionally an integer between 4-30 (e.g., 4, 5, 6, 7, 8, 9, 10, 11, 12, 13, 14, 15, 16, 17, 18, 19, 20, 21, 22, 23, 24, 25, 26, 27, 28, 29, 30), wherein the carboxy carbon is the alpha carbon and each of the carbons of Cx are designated beta, gamma, delta, epsilon, etc., wherein the beta carbon is attached to the alpha carbon. For example, wherein, when x is 4, the non-native alkyl group would be designated as follows: C_{ε}—C_{δ}—C_{γ} —C_{β}—C_{α}OOH. In exemplary embodiments, the carboxy-functionalized carbon chain is attached via a carbon other than the carboxy carbon, i.e., one of the carbons of Cx. In exemplary aspects, the carboxy-functionalized carbon chain is attached via the beta, gamma, delta, or epsilon carbon of the carboxy-functionalized carbon chain to the side chain of the alkylated amino acid. In alternative embodiments, the carboxy-functionalized carbon chain is attached via the beta, gamma, delta, or epsilon carbon of the carboxy-functionalized carbon chain to the side chain of a spacer which spacer is attached to the alkylated amino acid. In exemplary aspects, the carboxy-functionalized carbon chain is attached via the beta carbon of the carboxy-functionalized carbon chain to the side chain of the alkylated amino acid. In alternative embodiments, the carboxy-functionalized carbon chain is attached via the beta carbon of the carboxy-functionalized carbon chain to the side chain of a spacer which spacer is attached to the alkylated amino acid.

### Methods of Attaching an Acyl Group

[0141] Suitable methods of attaching acyl groups to peptides via amines, hydroxyls, and thiols of the peptides are known in the art. See, for example, Example 1 (for methods of acylating through an amine), Miller, Biochem Biophys Res Commun 218: 377-382 (1996); Shimohigashi and Stammer, Int J Pept Protein Res 19: 54-62 (1982); and Previero et al., Biochim Biophys Acta 263: 7-13 (1972) (for methods of acylating through a hydroxyl); and San and Silvius, J Pept Res 66: 169-180 (2005) (for methods of acylating through a thiol); Bioconjugate Chem. “Chemical Modifications of Proteins: History and Applications” pages 1, 2-12 (1990); Hashimoto et al., Pharmacuetical Res. “Synthesis of Palmitoyl Derivatives of Insulin and their Biological Activity” Vol. 6, No: 2 pp. 171-176 (1989).

[0142] In some embodiments, acylation occurs via acylation of a long chain alkane by the A-B dipeptide. In specific aspects, the long chain alkane comprises an amine, hydroxyl, or thiol group (e.g., octadecylamine, tetradecanol, and hexadecanethiol) which reacts with a carboxyl group, or activated form thereof, of the A-B peptide. The carboxyl group, or activated form thereof, can be part of a side chain of amino acid A.

[0143] In exemplary embodiments, the glucagon superfamily peptide comprises an acyl group by acylation of the long chain alkane by a spacer which is attached to A-B dipeptide. In specific aspects, the long chain alkane comprises an amine, hydroxyl, or thiol group which reacts with a carboxyl group, or activated form thereof, of the spacer. Suitable spacers comprising a carboxyl group, or activated form thereof, are described herein and include, for example, bifunctional spacers, e.g., amino acids, dipeptides, tripeptides, hydrophilic bifunctional spacers and hydrophobic bifunctional spacers.

[0144] As used herein, the term “activated form of a carboxyl group” refers to a carboxyl group with the general formula R(C═O)X, wherein X is a leaving group and

[0145] R is the glucagon analog or the spacer. For example, activated forms of a carboxyl groups may include, but are not limited to, acyl chlorides, anhydrides, and esters. In some embodiments, the activated carboxyl group is an ester with a N-hydroxysuccinimide ester (NHS) leaving group.

[0146] In some embodiments, an amine, hydroxyl, or thiol group of the A-B dipeptide is acylated with a cholesterol acid. In a specific embodiment, the A-B dipeptide is linked to the cholesterol acid through an alkylated des-amino Cys spacer, i.e., an alkylated 3-mercaptopropionic acid spacer.

[0147] When the acyl group is a succinic acid, succinic acid derivative, maleic acid, or maleic acid derivative the peptide is succinoylated/maleoylated by the reaction of an amine, hydroxyl, or thiol group of the GIP agonist peptide, or spacer, with a succinic acid, succinic acid derivative, maleic acid, or maleic acid derivative of Formula V, Formula VI, Formula VII, Formula VIII, Formula IX or formula X. Methods of succinoylation are described herein.

### Methods of Attaching an Alkyl Group

[0148] Methods of attaching an alkyl group to an amino acid are known in the art. For example, an alkyl groups activated with a leaving group may be reacted with an amino acid comprising a nucleophilic side chain, e.g., a side chain comprising an amine, hydroxyl, or thiol. The leaving group in exemplary aspects is a halogen, sulfonate ester, pyridylthiol, ammonium salt, or phenoxyl.

[0149] In exemplary embodiments, the amino acid to be attached to an alkyl group is a Cys residue and the sulfur atom is alkylated, e.g., “S-alkylated.” In exemplary embodiments, the sulfur of the Cys is reacted with the leaving group of an alkyl group comprising a carboxy-functionalized carbon chain of structure -Cx-COOH, wherein x is an integer, optionally an integer between 4-30 (e.g., 4, 5, 6, 7, 8, 9, 10, 11, 12, 13, 14, 15, 16, 17, 18, 19, 20, 21, 22, 23, 24, 25, 26, 27, 28, 29, 30), wherein the carboxy carbon is the alpha carbon and each of the carbons of Cx are designated beta, gamma, delta, epsilon, etc., wherein the beta carbon is attached to the alpha carbon. For example, wherein, when x is 4, the non-native alkyl group would be designated as follows: C_{ε}—C_{δ}—C_{γ}—C_{β}—C_{α}OOH. In exemplary embodiments, the carboxy-functionalized carbon chain is attached via a carbon other than the carboxy carbon, i.e., one of the carbons of Cx. In exemplary aspects, the carboxy-functionalized carbon chain is attached via the beta, gamma, delta, or epsilon carbon of the carboxy-functionalized carbon chain to the side chain of the alkylated amino acid. In alternative embodiments, the carboxy-functionalized carbon chain is attached via the beta, gamma, delta, or epsilon carbon of the carboxy-functionalized carbon chain to the side chain of a spacer which spacer is attached to the alkylated amino acid. In exemplary aspects, the carboxy-functionalized carbon chain is attached via the beta carbon of the carboxy-functionalized carbon chain to the side chain of the alkylated amino acid. In alternative embodiments, the carboxy-functionalized carbon chain is attached via the beta carbon of the carboxy-functionalized carbon chain to the side chain of a spacer which spacer is attached to the alkylated amino acid.

[0150] In exemplary aspects, the leaving group is a halogen, such as iodine, bromine, chlorine, or fluorine, sulfonate esters such as tosylate, triflates, or fluorosulfonates, pyridylthiol, ammonium salt, diazonium salts, nitrates, phosphates or phenoxyl.

[0151] in specific aspects, the alkyl group comprises an iodine leaving group and a carboxy-functionalized carbon chain comprising a total of 16 carbons (including the carbon of the carboxylate). Alkylation with such an iodo-carboxylic acid may be referred to as “S-palmityl alkylation” which is synonymous with “S-palmitate alkylation.” Further exemplification of S-palmityl alkylation is provided herein in Examples 1 and 20.

### Glucagon Related Peptides

[0152] In certain aspects the instant disclosure concerns glucagon related peptides (as part of the designated group “Q”). The term glucagon related peptide refers to those peptides which have biological activity (as agonists or antagonists) at any one or more of the glucagon, GLP-1, GLP-2, and GIP receptors and comprise an amino acid sequence that shares at least 40% sequence identity (e.g., 45%, 50%, 55%, 60%, 65%, 70%, 75%, 80%, 85%, 90%, 95%) with at least one of native glucagon, native oxyntomodulin, native exendin-4, native GLP-1, native GLP-2, or native GIP. It is understood that all possible activity subsets of glucagon related peptides are contemplated, e.g. peptides which have biological activity (as agonists or antagonists) at any one or more of the glucagon or GLP-1 or GIP receptors, together with all possible subsets of sequence identity to each listed native peptide, e.g., comprise an amino acid sequence that shares at least 40%, 45%, 50%, 55%, 60%, 65%, 70%, 75%, 80%, 85%, 90%, or 95% sequence identity with native glucagon over the length of native glucagon. In some embodiments of the invention, the glucagon related peptide is a peptide having glucagon receptor agonist activity, GIP receptor agonist activity, glucagon receptor/GLP-1 receptor co-agonist activity, glucagon receptor antagonist activity, or glucagon receptor antagonist & GLP-1 receptor agonist activity. In some embodiments, the peptide retains an alpha-helix conformation in the C-terminal half of the molecule. In some embodiments, the peptide retains positions involved in receptor interaction or signaling, e.g. position 3 of glucagon, or position 7, 10, 12, 13, 15 or 17 of (1-37)GLP-1. Accordingly, the glucagon related peptide can be a peptide of Class 1, Class 2, Class 3, Class 4, Class 5 and/or Class 6, each of which is further described herein.

[0153] In accordance with some embodiments the dipeptide prodrug element (including the acyl or alkyl group linked to the dipeptide prodrug element) can be attached via an amide linkage to any of the bioactive compounds previously disclosed in International application nos. PCT/US2008/08608 (filed on Jan. 3, 2008), PCT/US2008/053857 (filed on Feb. 13, 2008), PCT/US2009/47437 (filed on Jun. 16, 2009), PCT/US2009/47438 (filed on Jun. 16, 2009), PCT/US2009/47447 (filed on Jun. 16, 2009), PCT/US2008/080973 (filed on Oct. 23, 2008), and PCT/US2008/081333 (filed on Oct. 27, 2008), PCT/US09/47437 filed 16 Jun. 2009, PCT/US09/47438 filed 16 Jun. 2009, PCT/US09/47447 filed 16 Jun. 2009, PCT/US10/38825 filed 16 Jun. 2010, PCT/US10/59724 filed 9 Dec. 2010, PCT/US11/22608 filed 26 Jan. 2011, PCT/US11/35912 filed 10 May 2011, PCT/US11/35913 filed 10 May 2011, PCT/US11/41623 filed 23 Jun. 2011, PCT/US11/66164 filed 20 Dec. 2011, PCT/US11/66739 filed 22 Dec. 2011, PCT/US12/42085 filed 12 Jun. 2012, and PCT/US12/65492 filed 16 Nov. 2012, the disclosures of which including each of the sequences are hereby expressly incorporated by reference into the present application. The dipeptide prodrug element (including the acyl or alkyl group linked to the dipeptide prodrug element) disclosed herein can, in some exemplary embodiments, be linked to the bioactive peptides disclosed in PCT/US2008/08608, PCT/US2008/053857, PCT/US2009/47437, PCT/US2009/47438, PCT/US2009/47447, PCT/US2008/08097, and PCT/US2008/081333 or any of the disclosed preceding PCT applications.

[0154] In some embodiments, Q can be a peptide disclosed in PCT/US12/42084 filed 12-Jun.-12, while in some embodiments Q is not any of the peptides disclosed in PCT/US12/42084.

### Modifications

[0155] The glucagon related peptide can comprise the native glucagon amino acid sequence (SEQ ID NO; 701) with modifications. In exemplary embodiments, the glucagon related peptide may comprise a total of 1, up to 2, up to 3, up to 4, up to 5, up to 6, up to 7, up to 8, up to 9, or up to 10 amino acid modifications relative to the native glucagon sequence, e.g. conservative or non-conservative substitutions. Modifications and substitutions described herein are, in certain aspects made at specific positions within a glucagon related peptide wherein the numbering of the position corresponds to the numbering of glucagon (SEQ ID NO: 701). In some embodiments 1, 2, 3, 4 or 5 non-conservative substitutions are carried out at any of positions 2, 5, 7, 10, 11, 12, 13, 14, 17, 18, 19, 20, 21, 24, 27, 28 or 29 and up to 5 further conservative substitutions are carried out at any of these positions. In some embodiments 1, 2, or 3 amino acid modifications are carried out within amino acids at positions 1-16, and 1, 2 or 3 amino acid modifications are carried out within amino acids at positions 17-26. In some embodiments, such glucagon related peptides retain at least 22, 23, 24, 25, 26, 27 or 28 of the naturally occurring amino acids at the corresponding positions in native glucagon (e.g. have 1-7, 1-5 or 1-3 modifications relative to naturally occurring glucagon).

### DPP-IV Resistance

[0156] In some embodiments, the glucagon related peptide comprises a modification at position 1 or 2 to reduce susceptibility to cleavage by dipeptidyl peptidase IV. More particularly, in some embodiments, position 1 of a glucagon related peptide (e.g., selected from those in FIG. 10) is substituted with an amino acid selected from the group consisting of D-histidine, alpha, alpha-dimethyl imidiazole acetic acid (DMIA), N-methyl histidine, alpha-methyl histidine, imidazole acetic acid, desaminohistidine, hydroxyl-histidine, acetyl-histidine and homo-histidine. More particularly, in some embodiments, position 2 of the glucagon related peptide is substituted with an amino acid selected from the group consisting of D-serine, D-alanine, valine, glycine, N-methyl serine, and aminoisobutyric acid. In some embodiments, position 2 of the glucagon related peptide is not D-serine.

### Hydrophilic Moieties

[0157] In some embodiments, the glucagon related peptide, (e.g., a Class 1 glucagon related peptide, Class 2 glucagon related peptide, Class 3 glucagon related peptide, Class 4 glucagon related peptides or Class 5 glucagon related peptide, or Class 6 glucagon related peptide) is attached (covalently bonded) to a hydrophilic moiety. Hydrophilic moieties can be attached to the glucagon related peptide under any suitable conditions used to react a protein with an activated polymer molecule. Any means known in the art can be used, including via acylation, reductive alkylation, Michael addition, thiol alkylation or other chemoselective conjugation/ligation methods through a reactive group on the PEG moiety (e.g., an aldehyde, amino, ester, thiol, α-haloacetyl, maleimido or hydrazino group) to a reactive group on the target compound (e.g., an aldehyde, amino, ester, thiol, α-haloacetyl, maleimido or hydrazino group). Activating groups which can be used to link the water soluble polymer to one or more proteins include without limitation sulfone, maleimide, sulfhydryl, thiol, triflate, tresylate, azidirine, oxirane and 5-pyridyl. If attached to the peptide by reductive alkylation, the polymer selected should have a single reactive aldehyde so that the degree of polymerization is controlled. See, for example, Kinstler et al., Adv. Drug. Delivery Rev. 54: 477-485 (2002); Roberts et al., Adv. Drug Delivery Rev. 54: 459-476 (2002); and Zalipsky et al., Adv. Drug Delivery Rev. 16: 157-182 (1995).

[0158] With regard to the glucagon related peptides of Classes 1 to 3, further activating groups which can be used to link the water soluble polymer to one or more proteins include an alpha-halogenated acyl group (e.g., alpha-iodo acetic acid, alpha-bromoacetic acid, alpha-chloroacetic acid). In some embodiments, wherein the glucagon related peptide is a Class 1, Class 2, Class 6, or Class 3 glucagon related peptide, an amino acid comprising a thiol is modified with maleimide-activated PEG in a Michael addition reaction to result in a PEGylated peptide comprising the thioether linkage shown below:

[chemical structure]

[0159] In other embodiments, the thiol of an amino acid of a Class 1, Class 2, Class 6, or Class 3 glucagon related peptide is modified with a haloacetyl-activated PEG in a nucleophilic substitution reaction to result in a PEGylated peptide comprising the thioether linkage shown below:

[chemical structure]

[0160] Suitable hydrophilic moieties include polyethylene glycol (PEG), polypropylene glycol, polyoxyethylated polyols (e.g., POG), polyoxyethylated sorbitol, polyoxyethylated glucose, polyoxyethylated glycerol (POG), polyoxyalkylenes, polyethylene glycol propionaldehyde, copolymers of ethylene glycol/propylene glycol, monomethoxy-polyethylene glycol, mono-(C1-C10) alkoxy- or aryloxy-polyethylene glycol, carboxymethylcellulose, polyacetals, polyvinyl alcohol (PVA), polyvinyl pyrrolidone, poly-1,3-dioxolane, poly-1,3,6-trioxane, ethylene/maleic anhydride copolymer, poly (.beta.-amino acids) (either homopolymers or random copolymers), poly(n-vinyl pyrrolidone)polyethylene glycol, propropylene glycol homopolymers (PPG) and other polyakylene oxides, polypropylene oxide/ethylene oxide copolymers, colonic acids or other polysaccharide polymers, Ficoll or dextran and mixtures thereof. Dextrans are polysaccharide polymers of glucose subunits, predominantly linked by α1-6 linkages. Dextran is available in many molecular weight ranges, e.g., about 1 kD to about 100 kD, or from about 5, 10, 15 or 20 kD to about 20, 30, 40, 50, 60, 70, 80 or 90 kD.

[0161] In some embodiments the hydrophilic moiety is a polyethylene glycol (PEG) chain or other water soluble polymer that is covalently linked to the side chain of an amino acid residue at one or more of positions 16, 17, 21, 24, 29, 40 of said glucagon related peptide, within a C-terminal extension, or at the C-terminal amino acid. In some embodiments, the native amino acid at that position is substituted with an amino acid having a side chain suitable for crosslinking with hydrophilic moieties, to facilitate linkage of the hydrophilic moiety to the peptide. Exemplary amino acids include Cys, Lys, Orn, homo-Cys, or acetyl phenylalanine (Ac-Phe). In other embodiments, an amino acid modified to comprise a hydrophilic group is added to the peptide at the C-terminus.

[0162] The hydrophilic moiety, e.g., polyethylene glycol chain, in accordance with some embodiments has a molecular weight selected from the range of about 500 to about 40,000 Daltons. In some embodiments the polyethylene glycol chain has a molecular weight selected from the range of about 500 to about 5,000 Daltons, or about 1,000 to about 5,000 Daltons. In another embodiment the hydrophilic moiety, e.g., polyethylene glycol chain, has a molecular weight of about 10,000 to about 20,000 Daltons. In yet other exemplary embodiments the hydrophilic moiety, e.g. polyethylene glycol chain, has a molecular weight of about 20,000 to about 40,000 Daltons.

[0163] Linear or branched hydrophilic polymers are contemplated. Resulting preparations of conjugates may be essentially monodisperse or polydisperse, and may have about 0.5, 0.7, 1, 1.2, 1.5 or 2 polymer moieties per peptide.

### Acylation

[0164] In some embodiments, the glucagon related peptide (e.g. a Class 1 glucagon related peptide, Class 2 glucagon related peptide, Class 3 glucagon related peptide, Class 4 glucagon related peptide, Class 4 glucagon related peptides, Class 5 glucagon related peptide or Class 6 glucagon related peptide), is modified to comprise an acyl group. For example, the glucagon related peptide may be one of Class 1, Class 2, Class 6, or Class 3, and may comprise an acyl group which is non-native to a naturally-occurring amino acid. Acylation can be carried out at any position within the glucagon related peptide, including any of positions 1-29, a position within a C-terminal extension, or the C-terminal amino acid, provided that the activity exhibited by the non-acylated glucagon related peptide is retained upon acylation. For example, if the unacylated peptide has glucagon agonist activity, then the acylated peptide retains the glucagon agonist activity. Also for example, if the unacylated peptide has glucagon antagonist activity, then the acylated peptide retains the glucagon antagonist activity. For instance, if the unacylated peptide has GLP-1 agonist activity, then the acylated peptide retains GLP-1 agonist activity. Nonlimiting examples include acylation at positions 5, 7, 10, 11, 12, 13, 14, 16, 17, 18, 19, 20, 21, 24, 27, 28, or 29 (according to the amino acid numbering of wild type glucagon). With regard to Class 1, Class 2, Class 6, and Class 3 glucagon related peptides, acylation may occur at any of positions 5, 7, 10, 11, 12, 13, 14, 16, 17, 18, 19, 20, 21, 24, 27, 28, 29, 30, 37, 38, 39, 40, 41, 42, or 43 (according to the amino acid numbering of wild type glucagon). The acyl group can be covalently linked directly to an amino acid of the glucagon related peptide, or indirectly to an amino acid of the glucagon related peptide via a spacer, wherein the spacer is positioned between the amino acid of the glucagon related peptide and the acyl group. Glucagon related peptides may be acylated at the same amino acid position where a hydrophilic moiety is linked, or at a different amino acid position. Nonlimiting examples include acylation at position 10 (according to the amino acid numbering of the wild type glucagon) and pegylation at one or more positions in the C-terminal portion of the glucagon peptide, e.g., position 24, 28 or 29 (according to the amino acid numbering of the wild type glucagon), within a C-terminal extension, or at the C-terminus (e.g., through adding a C-terminal Cys).

[0165] In a specific aspect of the invention, the glucagon related peptide is modified to comprise an acyl group by direct acylation of an amine, hydroxyl, or thiol of a side chain of an amino acid of the glucagon related peptide. In some embodiments, the glucagon related peptide is directly acylated through the side chain amine, hydroxyl, or thiol of an amino acid. In some embodiments, acylation is at position 10, 20, 24, or 29 (according to the amino acid numbering of the wild type glucagon). In this regard, the acylated glucagon related peptide can comprise the amino acid sequence of SEQ ID NO: 701, or a modified amino acid sequence thereof comprising one or more of the amino acid modifications described herein, with at least one of the amino acids at positions 10, 20, 24, and 29 (according to the amino acid numbering of the wild type glucagon) modified to any amino acid comprising a side chain amine, hydroxyl, or thiol. In some specific embodiments of the invention, the direct acylation of the glucagon related peptide occurs through the side chain amine, hydroxyl, or thiol of the amino acid at position 10 (according to the amino acid numbering of the wild type glucagon).

[0166] In some embodiments, the amino acid comprising a side chain amine is an amino acid of Formula I:

[chemical structure]

[0167] In some exemplary embodiments, the amino acid of Formula I, is the amino acid wherein n is 4 (Lys) or n is 3 (Orn).

[0168] In other embodiments, the amino acid comprising a side chain hydroxyl is an amino acid of Formula II:

[chemical structure]

[0169] In some exemplary embodiments, the amino acid of Formula II is the amino acid wherein n is 1 (Ser).

[0170] In yet other embodiments, the amino acid comprising a side chain thiol is an amino acid of Formula III:

[chemical structure]

[0171] In some exemplary embodiments, the amino acid of Formula III is the amino acid wherein n is 1 (Cys).

[0172] In yet other embodiments, in which the glucagon related peptide is a Class 1, Class 2, Class 6, or Class 3 glucagon related peptide, the amino acid comprising a side chain amine, hydroxyl, or thiol is a disubstituted amino acid comprising the same structure of Formula I, Formula II, or Formula III, except that the hydrogen bonded to the alpha carbon of the amino acid of Formula I, Formula II, or Formula III is replaced with a second side chain.

[0173] In some embodiments of the invention, the acylated glucagon related peptide comprises a spacer between the peptide and the acyl group. In some embodiments, the glucagon related peptide is covalently bound to the spacer, which is covalently bound to the acyl group. In some exemplary embodiments, the glucagon related peptide is modified to comprise an acyl group by acylation of an amine, hydroxyl, or thiol of a spacer, which spacer is attached to a side chain of an amino acid at position 10, 20, 24, or 29 (according to the amino acid numbering of the wild type glucagon), or at the C-terminal amino acid of the glucagon related peptide. The amino acid to which the spacer is attached can be any amino acid comprising a moiety which permits linkage to the spacer. For example, an amino acid comprising a side chain —NH₂, —OH, or —COOH (e.g., Lys, Orn, Ser, Asp, or Glu) is suitable. Also, with regard to Class 1, Class 2, Class 6, and Class 3 glucagon related peptides, an amino acid (e.g., a singly or doubly α-substituted amino acid) comprising a side chain —NH₂, —OH, or —COOH (e.g., Lys, Orn, Ser, Asp, or Glu) is suitable. In this respect, the acylated glucagon related peptide can comprise the amino acid sequence of SEQ ID NO: 701, or a modified amino acid sequence thereof comprising one or more of the amino acid modifications described herein, with at least one of the amino acids at positions 10, 20, 24, and 29 (according to the amino acid numbering of the wild type glucagon) modified to any amino acid comprising a side chain amine, hydroxyl, or carboxylate.

[0174] In some embodiments, the spacer is an amino acid comprising a side chain amine, hydroxyl, or thiol, or a dipeptide or tripeptide comprising an amino acid comprising a side chain amine, hydroxyl, or thiol. In some embodiments, the amino acid spacer is not γ-Glu. In some embodiments, the dipeptide spacer is not γ-Glu-γ-Glu.

[0175] When acylation occurs through an amine group of the amino acid of the spacer, the acylation can occur through the alpha amine of the amino acid or a side chain amine. In the instance in which the alpha amine is acylated, the spacer amino acid can be any amino acid. For example, the spacer amino acid can be a hydrophobic amino acid, e.g., Gly, Ala, Val, Leu, Ile, Trp, Met, Phe, Tyr. In some embodiments in which the glucagon related peptide is a Class 1, Class 2, Class 6, or Class 3 glucagon related peptide, the spacer amino acid can be, for example, a hydrophobic amino acid, e.g., Gly, Ala, Val, Leu, Ile, Trp, Met, Phe, Tyr, 6-amino hexanoic acid, 5-aminovaleric acid, 7-aminoheptanoic acid, 8-aminooctanoic acid. Alternatively, the spacer amino acid can be an acidic residue, e.g., Asp and Glu. In the instance in which the side chain amine of the spacer amino acid is acylated, the spacer amino acid is an amino acid comprising a side chain amine, e.g., an amino acid of Formula I (e.g., Lys or Orn). In this instance, it is possible for both the alpha amine and the side chain amine of the spacer amino acid to be acylated, such that the glucagon peptide is diacylated. Embodiments of the invention include such diacylated molecules.

[0176] When acylation occurs through a hydroxyl group of the amino acid of the spacer, the amino acid or one of the amino acids of the dipeptide or tripeptide can be an amino acid of Formula II. In a specific exemplary embodiment, the amino acid is Ser.

[0177] When acylation occurs through a thiol group of the amino acid of the spacer, the amino acid or one of the amino acids of the dipeptide or tripeptide can be an amino acid of Formula III. In a specific exemplary embodiment, the amino acid is Cys.

[0178] In some embodiments, the spacer comprises a hydrophilic bifunctional spacer. In a specific embodiment, the spacer comprises an amino poly(alkyloxy)carboxylate. In this regard, the spacer can comprise, for example, NH₂(CH₂CH₂O)ₙ(CH₂)ₘCOOH, wherein m is any integer from 1 to 6 and n is any integer from 2 to 12, such as, e.g., 8-amino-3,6-dioxaoctanoic acid, which is commercially available from Peptides International, Inc. (Louisville, Ky.).

[0179] In some embodiments, pertaining only to Class 1, Class 2, Class 6, and Class 3 glucagon related peptides, the spacer comprises a hydrophilic bifunctional spacer. In certain embodiments, the hydrophilic bifunctional spacer attached to the Class 1, Class 2, Class 6, or Class 3 glucagon related peptide comprises two or more reactive groups, e.g., an amine, a hydroxyl, a thiol, and a carboxyl group or any combinations thereof. In certain embodiments, the hydrophilic bifunctional spacer attached to the Class 1, Class 2, Class 6, or Class 3 glucagon related peptide comprises a hydroxyl group and a carboxylate. In other embodiments, the hydrophilic bifunctional spacer attached to the Class 1, Class 2, Class 6, or Class 3 glucagon related peptide comprises an amine group and a carboxylate. In other embodiments, the hydrophilic bifunctional spacer attached to the Class 1, Class 2, Class 6, or Class 3 glucagon related peptide comprises a thiol group and a carboxylate.

[0180] In some embodiments in which the glucagon related peptide is a Class 1, Class 2, Class 6, or Class 3 glucagon related peptide, the spacer is a hydrophobic bifunctional spacer. Hydrophobic bifunctional spacers are known in the art. See, e.g., Bioconjugate Techniques, G. T. Hermanson (Academic Press, San Diego, Calif., 1996), which is incorporated by reference in its entirety. In certain embodiments, the hydrophobic bifunctional spacer attached to the Class 1, Class 2, Class 6, or Class 3 glucagon related peptide comprises two or more reactive groups, e.g., an amine, a hydroxyl, a thiol, and a carboxyl group or any combinations thereof. In certain embodiments, the hydrophobic bifunctional spacer attached to the Class 1, Class 2, Class 6, or Class 3 glucagon related peptide comprises a hydroxyl group and a carboxylate. In other embodiments, the hydrophobic bifunctional spacer attached to the Class 1, Class 2, Class 6, or Class 3 glucagon related peptide comprises an amine group and a carboxylate. In other embodiments, the hydrophobic bifunctional spacer attached to the Class 1, Class 2, Class 6, or Class 3 glucagon related peptide comprises a thiol group and a carboxylate. Suitable hydrophobic bifunctional spacers comprising a carboxylate and a hydroxyl group or a thiol group are known in the art and include, for example, 8-hydroxyoctanoic acid and 8-mercaptooctanoic acid.

[0181] In some embodiments, the bifunctional spacer attached to the Class 1, Class 2, Class 6, or Class 3 glucagon related peptide is not a dicarboxylic acid comprising an unbranched, methylene of 1 to 7 carbon atoms between the carboxylate groups. In some embodiments, the bifunctional spacer attached to the Class 1, Class 2, Class 6, or Class 3 glucagon related peptide is a dicarboxylic acid comprising an unbranched, methylene of 1-7 carbon atoms between the carboxylate groups.

[0182] The spacer (e.g., amino acid, dipeptide, tripeptide, hydrophilic bifunctional spacer, or hydrophobic bifunctional spacer) in specific embodiments, wherein the glucagon related peptide is a Class 1, Class 2, Class 6, or Class 3 glucagon related peptide, is 3 to 10 atoms (e.g., 6 to 10 atoms, (e.g., 6, 7, 8, 9, or 10 atoms) in length. In more specific embodiments in which the glucagon related peptide is a Class 1, Class 2, Class 6, or Class 3 glucagon related peptide, the spacer is about 3 to 10 atoms (e.g., 6 to 10 atoms) in length and the acyl group is a C12 to C18 fatty acyl group, e.g., C14 fatty acyl group, C16 fatty acyl group, such that the total length of the spacer and acyl group is 14 to 28 atoms, e.g., about 14, 15, 16, 17, 18, 19, 20, 21, 22, 23, 24, 25, 26, 27, or 28 atoms. In some embodiments, in which the glucagon related peptide is a Class 1, Class 2, Class 6, or Class 3 glucagon related peptide the length of the spacer and acyl group is 17 to 28 (e.g., 19 to 26, 19 to 21) atoms.

[0183] In accordance with certain embodiments in which the glucagon related peptide is a Class 1, Class 2, Class 6, or Class 3 glucagon related peptide, the bifunctional spacer can be a synthetic or naturally occurring amino acid (including, but not limited to, any of those described herein) comprising an amino acid backbone that is 3 to 10 atoms in length (e.g., 6-amino hexanoic acid, 5-aminovaleric acid, 7-aminoheptanoic acid, and 8-aminooctanoic acid). Alternatively, the spacer attached to the Class 1, Class 2, Class 6, or Class 3 glucagon related peptide can be a dipeptide or tripeptide spacer having a peptide backbone that is 3 to 10 atoms (e.g., 6 to 10 atoms) in length. Each amino acid of the dipeptide or tripeptide spacer attached to the Class 1, Class 2, Class 6, or Class 3 glucagon related peptide can be the same as or different from the other amino acid(s) of the dipeptide or tripeptide and can be independently selected from the group consisting of: naturally-occurring and/or non-naturally occurring amino acids, including, for example, any of the D or L isomers of the naturally-occurring amino acids (Ala, Cys, Asp, Glu, Phe, Gly, His, Ile, Lys, Leu, Met, Asn, Pro, Arg, Ser, Thr, Val, Trp, Tyr), or any D or L isomers of the non-naturally occurring amino acids selected from the group consisting of: β-alanine (β-Ala), N-α-methyl-alanine (Me-Ala), aminobutyric acid (Abu), γ-aminobutyric acid (γ-Abu), aminohexanoic acid (ε-Ahx), aminoisobutyric acid (Aib), aminomethylpyrrole carboxylic acid, aminopiperidinecarboxylic acid, aminoserine (Ams), aminotetrahydropyran-4-carboxylic acid, arginine N-methoxy-N-methyl amide, β-aspartic acid (β-Asp), azetidine carboxylic acid, 3-(2-benzothiazolyl)alanine, α-tert-butylglycine, 2-amino-5-ureido-n-valeric acid (citrulline, Cit), β-Cyclohexylalanine (Cha), acetamidomethyl-cysteine, diaminobutanoic acid (Dab), diaminopropionic acid (Dpr), dihydroxyphenylalanine (DOPA), dimethylthiazolidine (DMTA), γ-Glutamic acid (γ-Glu), homoserine (Hse), hydroxyproline (Hyp), isoleucine N-methoxy-N-methyl amide, methyl-isoleucine (MeIle), isonipecotic acid (Isn), methyl-leucine (MeLeu), methyl-lysine, dimethyl-lysine, trimethyl-lysine, methanoproline, methionine-sulfoxide (Met(0)), methionine-sulfone (Met(O₂)), norleucine (Nle), methyl-norleucine (Me-Nle), norvaline (Nva), ornithine (Orn), para-aminobenzoic acid (PABA), penicillamine (Pen), methylphenylalanine (MePhe), 4-Chlorophenylalanine (Phe(4-Cl)), 4-fluorophenylalanine (Phe(4-F)), 4-nitrophenylalanine (Phe(4-NO₂)), 4-cyanophenylalanine ((Phe(4-CN)), phenylglycine (Phg), piperidinylalanine, piperidinylglycine, 3,4-dehydroproline, pyrrolidinylalanine, sarcosine (Sar), selenocysteine (Sec), O-Benzyl-phosphoserine, 4-amino-3-hydroxy-6-methylheptanoic acid (Sta), 4-amino-5-cyclohexyl-3-hydroxypentanoic acid (ACHPA), 4-amino-3-hydroxy-5-phenylpentanoic acid (AHPPA), 1,2,3,4,-tetrahydro-isoquinoline-3-carboxylic acid (Tic), tetrahydropyranglycine, thienylalanine (Thi), O-benzyl-phosphotyrosine, O-Phosphotyrosine, methoxytyrosine, ethoxytyrosine, O-(bis-dimethylamino-phosphono)-tyrosine, tyrosine sulfate tetrabutylamine, methyl-valine (MeVal), and alkylated 3-mercaptopropionic acid.

[0184] In some embodiments in which the glucagon related peptide is a Class 1, Class 2, Class 6, or Class 3 glucagon related peptide, the spacer comprises an overall negative charge, e.g., comprises one or two negatively charged amino acids. In some embodiments in which the glucagon related peptide is a Class 1, Class 2, Class 6, or Class 3 glucagon related peptide, the dipeptide is not any of the dipeptides of general structure A-B, wherein A is selected from the group consisting of Gly, Gln, Ala, Arg, Asp, Asn, Ile, Leu, Val, Phe, and Pro, wherein B is selected from the group consisting of Lys, His, Trp. In some embodiments in which the glucagon related peptide is a Class 1, Class 2, Class 6, or Class 3 glucagon related peptide, the dipeptide spacer is selected from the group consisting of: Ala-Ala, β-Ala-β-Ala, Leu-Leu, Pro-Pro, γ-aminobutyric acid-γ-aminobutyric acid, and γ-Glu-γ-Glu.

[0185] In some embodiments of the invention in which the glucagon related peptide is a Class 1, Class 2, Class 6, or Class 3 glucagon related peptide, the glucagon related peptide is modified to comprise an acyl group by acylation of a long chain alkane by the glucagon related peptide. In specific aspects in which the glucagon related peptide is a Class 1, Class 2, Class 6, or Class 3 glucagon related peptide, the long chain alkane comprises an amine, hydroxyl, or thiol group (e.g. octadecylamine, tetradecanol, and hexadecanethiol) which reacts with a carboxyl group, or activated form thereof, of the glucagon related peptide. The carboxyl group, or activated form thereof, of the Class 1, Class 2, Class 6, or Class 3 glucagon related peptide can be part of a side chain of an amino acid (e.g., glutamic acid, aspartic acid) of the glucagon related peptide or can be part of the peptide backbone.

[0186] In certain embodiments, the Class 1, Class 2, Class 6, or Class 3 glucagon related peptide is modified to comprise an acyl group by acylation of the long chain alkane by a spacer which is attached to the glucagon peptide. In specific aspects, the long chain alkane comprises an amine, hydroxyl, or thiol group which reacts with a carboxyl group, or activated form thereof, of the spacer. Suitable spacers comprising a carboxyl group, or activated form thereof, are described herein and include, for example, bifunctional spacers, e.g., amino acids, dipeptides, tripeptides, hydrophilic bifunctional spacers and hydrophobic bifunctional spacers.

[0187] As used herein, the term “activated form of a carboxyl group” refers to a carboxyl group with the general formula R(C═O)X, wherein X is a leaving group and R is the glucagon related peptide or the spacer. For example, activated forms of a carboxyl groups may include, but are not limited to, acyl chlorides, anhydrides, and esters. In some embodiments, the activated carboxyl group is an ester with a N-hydroxysuccinimide (NHS) leaving group.

[0188] With regard to these aspects of the invention, in which a long chain alkane is acylated by the Class 1, Class 2, Class 6, or Class 3 glucagon related peptide or the spacer, the long chain alkane may be of any size and can comprise any length of carbon chain. The long chain alkane can be linear or branched. In certain aspects in which the glucagon related peptide is a Class 1, Class 2, Class 6, or Class 3 glucagon related peptide, the long chain alkane is a C4 to C30 alkane. For example, the long chain alkane can be any of a C4 alkane, C6 alkane, C8 alkane, C10 alkane, C12 alkane, C14 alkane, C16 alkane, C18 alkane, C20 alkane, C22 alkane, C24 alkane, C26 alkane, C28 alkane, or a C30 alkane. In some embodiments in which the glucagon related peptide is a Class 1, Class 2, Class 6, or Class 3 glucagon related peptide, the long chain alkane comprises a C8 to C20 alkane, e.g., a C14 alkane, C16 alkane, or a C18 alkane.

[0189] Also, in some embodiments in which the glucagon related peptide is a Class 1, Class 2, Class 6, or Class 3 glucagon related peptide, an amine, hydroxyl, or thiol group of the glucagon related peptide is acylated with a cholesterol acid. In a specific embodiment, the Class 1, Class 2, Class 6, or Class 3 glucagon related peptide is linked to the cholesterol acid through an alkylated des-amino Cys spacer, i.e., an alkylated 3-mercaptopropionic acid spacer.

[0190] Suitable methods of peptide acylation via amines, hydroxyls, and thiols are known in the art. See, for example, Miller, Biochem Biophys Res Commun 218: 377-382 (1996); Shimohigashi and Stammer, Int J Pept Protein Res 19: 54-62 (1982); and Previero et al., Biochim Biophys Acta 263: 7-13 (1972) (for methods of acylating through a hydroxyl); and San and Silvius, J Pept Res 66: 169-180 (2005) (for methods of acylating through a thiol); Bioconjugate Chem. “Chemical Modifications of Proteins: History and Applications” pages 1, 2-12 (1990); Hashimoto et al., Pharmacuetical Res. “Synthesis of Palmitoyl Derivatives of Insulin and their Biological Activity” Vol. 6, No: 2 pp. 171-176 (1989).

[0191] The acyl group of the acylated glucagon related peptide can be of any size, e.g., any length carbon chain, and can be linear or branched. In some specific embodiments of the invention, the acyl group is a C4 to C30 fatty acid. For example, the acyl group can be any of a C4 fatty acid, C6 fatty acid, C8 fatty acid, C10 fatty acid, C12 fatty acid, C14 fatty acid, C16 fatty acid, C18 fatty acid, C20 fatty acid, C22 fatty acid, C24 fatty acid, C26 fatty acid, C28 fatty acid, or a C30 fatty acid. In some embodiments, the acyl group is a C8 to C20 fatty acid, e.g., a C14 fatty acid or a C16 fatty acid.

[0192] In an alternative embodiment, the acyl group is a bile acid. The bile acid can be any suitable bile acid, including, but not limited to, cholic acid, chenodeoxycholic acid, deoxycholic acid, lithocholic acid, taurocholic acid, glycocholic acid, and cholesterol acid.

[0193] The acylated glucagon related peptides described herein can be further modified to comprise a hydrophilic moiety. In some specific embodiments the hydrophilic moiety can comprise a polyethylene glycol (PEG) chain. The incorporation of a hydrophilic moiety can be accomplished through any suitable means, such as any of the methods described herein. In this regard, the acylated glucagon related peptide can comprise SEQ ID NO: 701, including any of the modifications described herein, in which at least one of the amino acids at position 10, 20, 24, and 29 (according to the amino acid numbering of the wild type glucagon) comprise an acyl group and at least one of the amino acids at position 16, 17, 21, 24, or 29 (according to the amino acid numbering of the wild type glucagon), a position within a C-terminal extension, or the C-terminal amino acid are modified to a Cys,

[0194] Lys, Orn, homo-Cys, or Ac-Phe, and the side chain of the amino acid is covalently bonded to a hydrophilic moiety (e.g., PEG). In some embodiments, the acyl group is attached to position 10 (according to the amino acid numbering of the wild type glucagon), optionally via a spacer comprising Cys, Lys, Orn, homo-Cys, or Ac-Phe, and the hydrophilic moiety is incorporated at a Cys residue at position 24.

[0195] Alternatively, the acylated glucagon related peptide can comprise a spacer, wherein the spacer is both acylated and modified to comprise the hydrophilic moiety. Nonlimiting examples of suitable spacers include a spacer comprising one or more amino acids selected from the group consisting of Cys, Lys, Orn, homo-Cys, and Ac-Phe.

[0196] Alkylation

[0197] In accordance with some embodiments, the glucagon related peptide, e.g., a Class 1 glucagon related peptide, Class 2 glucagon related peptide, Class 3 glucagon related peptide, Class 4 glucagon peptide, Class 5 glucagion related peptide, or Class 6 glucagon related peptide, is modified to comprise an alkyl group which is attached to the glucagon related peptide via an ether, thioether, or amino linkage for purposes of prolonging half-life in circulation and/or delaying the onset of and/or extending the duration of action and/or improving resistance to proteases such as DPP-IV. In exemplary embodiments in which the glucagon related peptide is a Class 1, Class 2, Class 6, or Class 3 glucagon related peptide, the glucagon related peptide comprises an alkyl group which is non-native to a naturally-occurring amino acid.

[0198] Alkylation can be carried out at any position within the glucagon related peptide, including any of positions 1-29, a position within a C-terminal extension, or the C-terminal amino acid, provided that an agonist or antagonist activity of the glucagon related peptide with respect to glucagon, GLP-1 or other glucagon-related peptide receptor is retained. In some embodiments, if the unalkylated peptide has glucagon agonist activity, then the alkylated peptide retains glucagon agonist activity is retained. In other embodiments, if the unalkylated peptide has glucagon antagonist activity, then the alkylated peptide retains glucagon antagonist activity. In some embodiments, if the unalkylated peptide has GLP-1 agonist activity, then the alkylated peptide retains GLP-1 agonist activity. Nonlimiting examples include alkylation at positions 5, 7, 10, 11, 12, 13, 14, 16, 17, 18, 19, 20, 21, 24, 27, 28, or 29 (according to the amino acid numbering of wild type glucagon). With regard to Class 1, Class 2, Class 6, and Class 3 glucagon related peptides, alkylation can occur at positions 5, 7, 10, 11, 12, 13, 14, 16, 17, 18, 19, 20, 21, 24, 27, 28, 29, 30, 37, 38, 39, 40, 41, 42, or 43 (according to the amino acid numbering of wild type glucagon). The alkyl group can be covalently linked directly to an amino acid of the glucagon related peptide, or indirectly to an amino acid of the glucagon related peptide via a spacer, wherein the spacer is positioned between the amino acid of the glucagon related peptide and the alkyl group. Glucagon related peptides may be alkylated at the same amino acid position where a hydrophilic moiety is linked, or at a different amino acid position. Nonlimiting examples include alkylation at position 10 (according to the amino acid numbering of wild type glucagon) and pegylation at one or more positions in the C-terminal portion of the glucagon related peptide, e.g., position 24, 28 or 29 (according to the amino acid numbering of wild type glucagon), within a C-terminal extension, or at the C-terminus (e.g., through adding a C-terminal Cys).

[0199] In a specific aspect of the invention, the glucagon related peptide is modified to comprise an alkyl group by direct alkylation of an amine, hydroxyl, or thiol of a side chain of an amino acid of the glucagon related peptide. In some embodiments, the glucagon related peptide is directly alkylated through the side chain amine, hydroxyl, or thiol of an amino acid. In some embodiments, alkylation is at position 10, 20, 24, or 29 (according to the amino acid numbering of wild type glucagon). In this regard, the alkylated glucagon related peptide can comprise the amino acid sequence of SEQ ID NO: 701, or a modified amino acid sequence thereof comprising one or more of the amino acid modifications described herein, with at least one of the amino acids at positions 10, 20, 24, and 29 (according to the amino acid numbering of wild type glucagon) modified to any amino acid comprising a side chain amine, hydroxyl, or thiol. In some specific embodiments of the invention, the direct alkylation of the glucagon related peptide occurs through the side chain amine, hydroxyl, or thiol of the amino acid at position 10 (according to the amino acid numbering of wild type glucagon).

[0200] In some embodiments, the amino acid comprising a side chain amine is an amino acid of Formula I. In some exemplary embodiments, the amino acid of Formula I, is the amino acid wherein n is 4 (Lys) or n is 3 (Orn).

[0201] In other embodiments, the amino acid comprising a side chain hydroxyl is an amino acid of Formula II. In some exemplary embodiments, the amino acid of Formula II is the amino acid wherein n is 1 (Ser).

[0202] In yet other embodiments, the amino acid comprising a side chain thiol is an amino acid of Formula III. In some exemplary embodiments, the amino acid of Formula II is the amino acid wherein n is 1 (Cys).

[0203] In yet other embodiments, in which the glucagon related peptide is a Class 1, Class 2, Class 6, or Class 3 glucagon related peptide, the amino acid comprising a side chain amine, hydroxyl, or thiol is a disubstituted amino acid comprising the same structure of Formula I, Formula II, or Formula III, except that the hydrogen bonded to the alpha carbon of the amino acid of Formula I, Formula II, or Formula III is replaced with a second side chain.

[0204] In some embodiments of the invention, the alkylated glucagon related peptide comprises a spacer between the peptide and the alkyl group. In some embodiments, the glucagon related peptide is covalently bound to the spacer, which is covalently bound to the alkyl group. In some exemplary embodiments, the glucagon related peptide is modified to comprise an alkyl group by alkylation of an amine, hydroxyl, or thiol of a spacer, which spacer is attached to a side chain of an amino acid at position 10, 20, 24, or 29 (according to the amino acid numbering of wild type glucagon) of the glucagon related peptide. The amino acid to which the spacer is attached can be any amino acid comprising a moiety which permits linkage to the spacer. With regard to Class 1, Class 2, Class 6, and Class 3 glucagon related peptides, the amino acid to which the spacer is attached can be any amino acid (e.g., a singly α-substituted amino acid or an α,α-disubstituted amino acid) comprising a moiety which permits linkage to the spacer. For example, an amino acid comprising a side chain —NH₂, —OH, or —COOH (e.g., Lys, Orn, Ser, Asp, or Glu) is suitable. In this respect, the alkylated glucagon related peptide can comprise the amino acid sequence of SEQ ID NO: 701, or a modified amino acid sequence thereof comprising one or more of the amino acid modifications described herein, with at least one of the amino acids at positions 10, 20, 24, and 29 (according to the amino acid numbering of wild type glucagon) modified to any amino acid comprising a side chain amine, hydroxyl, or carboxylate.

[0205] In some embodiments, the spacer is an amino acid comprising a side chain amine, hydroxyl, or thiol or a dipeptide or tripeptide comprising an amino acid comprising a side chain amine, hydroxyl, or thiol. In some embodiments, the amino acid spacer is not γ-Glu. In some embodiments, the dipeptide spacer is not γ-Glu-γ-Glu.

[0206] When alkylation occurs through an amine group of the amino acid of the spacer the alkylation can occur through the alpha amine of the amino acid or a side chain amine. In the instance in which the alpha amine is alkylated, the spacer amino acid can be any amino acid. For example, the spacer amino acid can be a hydrophobic amino acid, e.g., Gly, Ala, Val, Leu, Ile, Trp, Met, Phe, Tyr. Alternatively, the spacer amino acid can be an acidic residue, e.g., Asp and Glu. In exemplary embodiments in which the glucagon related peptide is a Class 1, Class 2, Class 6, or Class 3 glucagon related peptide, the spacer amino acid can be a hydrophobic amino acid, e.g., Gly, Ala, Val, Leu, Ile, Trp, Met, Phe, Tyr, 6-amino hexanoic acid, 5-aminovaleric acid, 7-aminoheptanoic acid, 8-aminooctanoic acid. Alternatively, the spacer amino acid attached to the Class 1, Class 2, Class 6, or Class 3 glucagon related peptide can be an acidic residue, e.g., Asp and Glu, provided that the alkylation occurs on the alpha amine of the acidic residue. In the instance in which the side chain amine of the spacer amino acid is alkylated, the spacer amino acid is an amino acid comprising a side chain amine, e.g., an amino acid of Formula I (e.g., Lys or Orn). In this instance, it is possible for both the alpha amine and the side chain amine of the spacer amino acid to be alkylated, such that the glucagon peptide is dialkylated. Embodiments of the invention include such dialkylated molecules.

[0207] When alkylation occurs through a hydroxyl group of the amino acid of the spacer, the amino acid or one of the amino acids of the spacer can be an amino acid of Formula II. In a specific exemplary embodiment, the amino acid is Ser.

[0208] When alkylation occurs through a thiol group of the amino acid of the spacer, the amino acid or one of the amino acids of the spacer can be an amino acid of Formula III. In a specific exemplary embodiment, the amino acid is Cys.

[0209] In some embodiments, the spacer comprises a hydrophilic bifunctional spacer. In a specific embodiment, the spacer comprises an amino poly(alkyloxy)carboxylate. In this regard, the spacer can comprise, for example, NH₂(CH₂CH₂O)ₙ(CH₂)ₘCOOH, wherein m is any integer from 1 to 6 and n is any integer from 2 to 12, such as, e.g., 8-amino-3,6-dioxaoctanoic acid, which is commercially available from Peptides International, Inc. (Louisville, Ky.).

[0210] In some embodiments in which the glucagon related peptide is a Class 1, Class 2, Class 6, or Class 3 glucagon related peptide, the spacer is a hydrophilic bifunctional spacer. In certain embodiments, the hydrophilic bifunctional spacer attached to the Class 1, Class 2, Class 6, or Class 3 glucagon related peptide comprises two or more reactive groups, e.g., an amine, a hydroxyl, a thiol, and a carboxyl group or any combinations thereof. In certain embodiments, the hydrophilic bifunctional spacer attached to the Class 1, Class 2, Class 6, or Class 3 glucagon related peptide comprises a hydroxyl group and a carboxylate. In other embodiments, the hydrophilic bifunctional spacer attached to the Class 1, Class 2, Class 6, or Class 3 glucagon related peptide comprises an amine group and a carboxylate. In other embodiments, the hydrophilic bifunctional spacer attached to the Class 1, Class 2, Class 6, or Class 3 glucagon related peptide comprises a thiol group and a carboxylate.

[0211] In some embodiments, the spacer attached to the Class 1, Class 2, Class 6, or Class 3 glucagon related peptide is a hydrophobic bifunctional spacer. In certain embodiments, the hydrophobic bifunctional spacer attached to the Class 1, Class 2, Class 6, or Class 3 glucagon related peptide comprises two or more reactive groups, e.g., an amine, a hydroxyl, a thiol, and a carboxyl group or any combinations thereof. In certain embodiments, the hydrophobic bifunctional spacer attached to the Class 1, Class 2, Class 6, or Class 3 glucagon related peptide comprises a hydroxyl group and a carboxylate. In other embodiments, the hydropholic bifunctional spacer attached to the Class 1, Class 2, Class 6, or Class 3 glucagon related peptide comprises an amine group and a carboxylate. In other embodiments, the hydropholic bifunctional spacer attached to the Class 1, Class 2, Class 6, or Class 3 glucagon related peptide comprises a thiol group and a carboxylate. Suitable hydrophobic bifunctional spacers comprising a carboxylate and a hydroxyl group or a thiol group are known in the art and include, for example, 8-hydroxyoctanoic acid and 8-mercaptooctanoic acid.

[0212] The spacer (e.g., amino acid, dipeptide, tripeptide, hydrophilic bifunctional spacer, or hydrophobic bifunctional spacer) in specific embodiments in which the glucagon related peptide is a Class 1, Class 2, Class 6, or Class 3 glucagon related peptide is 3 to 10 atoms (e.g., 6 to 10 atoms, (e.g., 6, 7, 8, 9, or 10 atoms)) in length. In more specific embodiments, the spacer attached to the Class 1, Class 2, Class 6, or Class 3 glucagon related peptide is about 3 to 10 atoms (e.g., 6 to 10 atoms) in length and the alkyl is a C12 to C18 alkyl group, e.g., C14 alkyl group, C16 alkyl group, such that the total length of the spacer and alkyl group is 14 to 28 atoms, e.g., about 14, 15, 16, 17, 18, 19, 20, 21, 22, 23, 24, 25, 26, 27, or 28 atoms. In some embodiments in which the glucagon related peptide is a Class 1, Class 2, Class 6, or Class 3 glucagon related peptide, the length of the spacer and alkyl is 17 to 28 (e.g., 19 to 26, 19 to 21) atoms.

[0213] In accordance with certain foregoing embodiments in which the glucagon related peptide is a Class 1, Class 2, Class 6, or Class 3 glucagon related peptide, the bifunctional spacer can be a synthetic or non-naturally occurring amino acid comprising an amino acid backbone that is 3 to 10 atoms in length (e.g., 6-amino hexanoic acid, 5-aminovaleric acid, 7-aminoheptanoic acid, and 8-aminooctanoic acid). Alternatively, the spacer attached to the Class 1, Class 2, Class 6, or Class 3 glucagon related peptide can be a dipeptide or tripeptide spacer having a peptide backbone that is 3 to 10 atoms (e.g., 6 to 10 atoms) in length. The dipeptide or tripeptide spacer attached to the Class 1, Class 2, Class 6, or Class 3 glucagon related peptide can be composed of naturally-occurring and/or non-naturally occurring amino acids, including, for example, any of the amino acids taught herein. In some embodiments in which the glucagon related peptide is a Class 1, Class 2, Class 6, or Class 3 glucagon related peptide, the spacer comprises an overall negative charge, e.g., comprises one or two negatively charged amino acids. In some embodiments in which the glucagon related peptide is a Class 1, Class 2, Class 6, or Class 3 glucagon related peptide, the dipeptide spacer is selected from the group consisting of: Ala-Ala, β-Ala-β-Ala, Leu-Leu, Pro-Pro, γ-aminobutyric acid-γ-aminobutyric acid, and γ-Glu-γ-Glu. In some embodiments, the dipeptide spacer is not γ-Glu-γ-Glu.

[0214] Suitable methods of peptide alkylation via amines, hydroxyls, and thiols are known in the art. For example, a Williamson ether synthesis can be used to form an ether linkage between the glucagon related peptide and the alkyl group. Also, a nucleophilic substitution reaction of the peptide with an alkyl halide can result in any of an ether, thioether, or amino linkage.

[0215] The alkyl group of the alkylated glucagon related peptide can be of any size, e.g., any length carbon chain, and can be linear or branched. In some embodiments of the invention, the alkyl group is a C4 to C30 alkyl. For example, the alkyl group can be any of a C4 alkyl, C6 alkyl, C8 alkyl, C10 alkyl, C12 alkyl, C14 alkyl, C16 alkyl, C18 alkyl, C20 alkyl, C22 alkyl, C24 alkyl, C26 alkyl, C28 alkyl, or a C30 alkyl. In some embodiments, the alkyl group is a C8 to C20 alkyl, e.g., a C14 alkyl or a C16 alkyl.

[0216] In some specific embodiments, the alkyl group comprises a steroid moiety of a bile acid, e.g., cholic acid, chenodeoxycholic acid, deoxycholic acid, lithocholic acid, taurocholic acid, glycocholic acid, and cholesterol acid.

[0217] In some embodiments of the invention in which the glucagon related peptide is a Class 1, Class 2, Class 6, or Class 3 glucagon related peptide, the glucagon related peptide is modified to comprise an alkyl group by reacting a nucleophilic, long chain alkane with the glucagon related peptide, wherein the glucagon related peptide comprises a leaving group suitable for nucleophilic substitution. In specific aspects in which the glucagon related peptide is a Class 1, Class 2, Class 6, or Class 3 glucagon related peptide, the nucleophilic group of the long chain alkane comprises an amine, hydroxyl, or thiol group (e.g. octadecylamine, tetradecanol, and hexadecanethiol). The leaving group of the Class 1, Class 2, Class 6, or Class 3 glucagon related peptide can be part of a side chain of an amino acid or can be part of the peptide backbone. Suitable leaving groups include, for example, N-hydroxysuccinimide, halogens, and sulfonate esters.

[0218] In certain embodiments, the Class 1, Class 2, Class 6, or Class 3 glucagon related peptide is modified to comprise an alkyl group by reacting the nucleophilic, long chain alkane with a spacer which is attached to the glucagon related peptide, wherein the spacer comprises the leaving group. In specific aspects in which the glucagon related peptide is a Class 1, Class 2, Class 6, or Class 3 glucagon related peptide, the long chain alkane comprises an amine, hydroxyl, or thiol group. In certain embodiments in which the glucagon related peptide is a Class 1, Class 2, Class 6, or Class 3 glucagon related peptide, the spacer comprising the leaving group can be any spacer discussed herein, e.g., amino acids, dipeptides, tripeptides, hydrophilic bifunctional spacers and hydrophobic bifunctional spacers further comprising a suitable leaving group.

[0219] With regard to these aspects of the invention in which the glucagon related peptide is a Class 1, Class 2, Class 6, or Class 3 glucagon related peptide and in which a long chain alkane is alkylated by the glucagon related peptide or the spacer, the long chain alkane may be of any size and can comprise any length of carbon chain. The long chain alkane can be linear or branched. In certain aspects, the long chain alkane is a C4 to C30 alkane. For example, the long chain alkane can be any of a C4 alkane, C6 alkane, C8 alkane, C10 alkane, C12 alkane, C14 alkane, C16 alkane, C18 alkane, C20 alkane, C22 alkane, C24 alkane, C26 alkane, C28 alkane, or a C30 alkane. In some embodiments in which the glucagon related peptide is a Class 1, Class 2, Class 6, or Class 3 glucagon related peptide, the long chain alkane comprises a C8 to C20 alkane, e.g., a C14 alkane, C16 alkane, or a C18 alkane.

[0220] Also, in some embodiments in which the glucagon related peptide is a Class 1, Class 2, Class 6, or Class 3 glucagon related peptide, alkylation can occur between the glucagon related peptide and a cholesterol moiety. For example, the hydroxyl group of cholesterol can displace a leaving group on the long chain alkane to form a cholesterol-glucagon peptide product.

[0221] The alkylated glucagon related peptides described herein can be further modified to comprise a hydrophilic moiety. In some specific embodiments the hydrophilic moiety can comprise a polyethylene glycol (PEG) chain. The incorporation of a hydrophilic moiety can be accomplished through any suitable means, such as any of the methods described herein. In this regard, the alkylated glucagon related peptide can comprise SEQ ID NO: 701, or a modified amino acid sequence thereof comprising one or more of the amino acid modifications described herein, in which at least one of the amino acids at position 10, 20, 24, and 29 (according to the amino acid numbering of wild type glucagon) comprise an alkyl group and at least one of the amino acids at position 16, 17, 21, 24, and 29, a position within a C-terminal extension or the C-terminal amino acid are modified to a Cys, Lys, Orn, homo-Cys, or Ac-Phe, and the side chain of the amino acid is covalently bonded to a hydrophilic moiety (e.g., PEG). In some embodiments, the alkyl group is attached to position 10 (according to the amino acid numbering of wild type glucagon), optionally via a spacer comprising Cys, Lys, Orn, homo-Cys, or Ac-Phe, and the hydrophilic moiety is incorporated at a Cys residue at position 24.

[0222] Alternatively, the alkylated glucagon related peptide can comprise a spacer, wherein the spacer is both alkylated and modified to comprise the hydrophilic moiety. Nonlimiting examples of suitable spacers include a spacer comprising one or more amino acids selected from the group consisting of Cys, Lys, Orn, homo-Cys, and Ac-Phe.

[0223] Stabilization of the Alpha-Helix Structure

[0224] In some embodiments, an intramolecular bridge is formed between two amino acid side chains to stabilize the three dimensional structure of the carboxy terminal portion (e.g., amino acids 12-29 (according to the amino acid numbering of wild type glucagon)) of the glucagon related peptide. The two amino acid side chains can be linked to one another through hydrogen-bonding, ionic interactions, such as the formation of salt bridges, or by covalent bonds.

[0225] In some embodiments, the intramolecular bridge is formed between two amino acids that are 3 amino acids apart, e.g., amino acids at positions i and i+4, wherein i is any integer between 12 and 25 (e.g., 12, 13, 14, 15, 16, 17, 18, 19, 20, 21, 22, 23, 24, and 25) according to the amino acid numbering of wild type glucagon. More particularly, the side chains of the amino acid pairs 12 and 16, 16 and 20, 20 and 24 or 24 and 28 (amino acid pairs in which i=12, 16, 20, or 24) according to the amino acid numbering of wild type glucagon are linked to one another and thus stabilize the glucagon alpha helix. Alternatively, i can be 17.

[0226] In some specific embodiments, wherein the amino acids at positions i and i+4 are joined by an intramolecular bridge, the size of the linker is about 8 atoms, or about 7-9 atoms.

[0227] In other embodiments, the intramolecular bridge is formed between two amino acids that are two amino acids apart, e.g., amino acids at positions j and j+3, wherein j is any integer between 12 and 26 (e.g., 12, 13, 14, 15, 16, 17, 18, 19, 20, 21, 22, 23, 24, 25, and 26) according to the amino acid numbering of wild type glucagon. In some specific embodiments, j is 17.

[0228] In some specific embodiments, wherein amino acids at positions j and j+3 are joined by an intramolecular bridge, the size of the linker is about 6 atoms, or about 5 to 7 atoms.

[0229] In yet other embodiments, the intramolecular bridge is formed between two amino acids that are 6 amino acids apart, e.g., amino acids at positions k and k+7, wherein k is any integer between 12 and 22 (e.g., 12, 13, 14, 15, 16, 17, 18, 19, 20, 21, and 22) according to the amino acid numbering of wild type glucagon. In some specific embodiments, k is 12, 13, or 17. In an exemplary embodiment, k is 17.

[0230] Examples of amino acid pairings that are capable of covalently bonding to form a six-atom linking bridge include Orn and Asp, Glu and an amino acid of Formula I, wherein n is 2, and homoglutamic acid and an amino acid of Formula I, wherein n is 1, wherein Formula I is:

[chemical structure]

[0231] Examples of amino acid pairing that are capable of covalently bonding to form a seven-atom linking bridge include Orn-Glu (lactam ring); Lys-Asp (lactam); or Homoser-Homoglu (lactone). Examples of amino acid pairings that may form an eight-atom linker include Lys-Glu (lactam); Homolys-Asp (lactam); Orn-Homoglu (lactam); 4-aminoPhe-Asp (lactam); or Tyr-Asp (lactone). Examples of amino acid pairings that may form a nine-atom linker include Homolys-Glu (lactam); Lys-Homoglu (lactam); 4-aminoPhe-Glu (lactam); or Tyr-Glu (lactone). Any of the side chains on these amino acids may additionally be substituted with additional chemical groups, so long as the three-dimensional structure of the alpha-helix is not disrupted. One of ordinary skill in the art can envision alternative pairings or alternative amino acid analogs, including chemically modified derivatives, that would create a stabilizing structure of similar size and desired effect. For example, a homocysteine-homocysteine disulfide bridge is 6 atoms in length and may be further modified to provide the desired effect. Even without covalent linkage, the amino acid pairings described above or similar pairings that one of ordinary skill in the art can envision may also provide added stability to the alpha-helix through non-covalent bonds, for example, through formation of salt bridges or hydrogen-bonding interactions.

[0232] The size of a lactam ring can vary depending on the length of the amino acid side chains, and in some embodiments the lactam is formed by linking the side chains of a lysine amino acid to a glutamic acid side chain. Further exemplary embodiments (according to the amino acid numbering of wild type glucagon) include the following pairings, optionally with a lactam bridge: Glu at position 12 with Lys at position 16; native Lys at position 12 with Glu at position 16; Glu at position 16 with Lys at position 20; Lys at position 16 with Glu at position 20; Glu at position 20 with Lys at position 24; Lys at position 20 with Glu at position 24; Glu at position 24 with Lys at position 28; Lys at position 24 with Glu at position 28. Alternatively, the order of the amide bond in the lactam ring can be reversed (e.g., a lactam ring can be formed between the side chains of a Lys12 and a Glu16 or alternatively between a Glu 12 and a Lys16).

[0233] Intramolecular bridges other than a lactam bridge can be used to stabilize the alpha helix of the glucagon related peptides. In some embodiments, the intramolecular bridge is a hydrophobic bridge. In this instance, the intramolecular bridge optionally is between the side chains of two amino acids that are part of the hydrophobic face of the alpha helix of the glucagon related peptide. For example, one of the amino acids joined by the hydrophobic bridge can be the amino acid at position 10, 14, and 18 (according to the amino acid numbering of wild type glucagon).

[0234] In one specific aspect, olefin metathesis is used to cross-link one or two turns of the alpha helix of the glucagon related peptide using an all-hydrocarbon cross-linking system. The glucagon related peptide in this instance can comprise α-methylated amino acids bearing olefinic side chains of varying length and configured with either R or S stereochemistry at the i and i+4 or i+7 positions. For example, the olefinic side can comprise (CH₂)n, wherein n is any integer between 1 to 6. In some embodiments, n is 3 for a cross-link length of 8 atoms. Suitable methods of forming such intramolecular bridges are described in the art. See, for example, Schafmeister et al., J. Am. Chem. Soc. 122: 5891-5892 (2000) and Walensky et al., Science 305: 1466-1470 (2004). Alternatively, the glucagon peptide can comprise O-allyl Ser residues located on adjacent helical turns, which are bridged together via ruthenium-catalyzed ring closing metathesis. Such procedures of cross-linking are described in, for example, Blackwell et al., Angew, Chem., Int. Ed. 37: 3281-3284 (1998).

[0235] In another specific aspect, use of the unnatural thio-dialanine amino acid, lanthionine, which has been widely adopted as a peptidomimetic of cystine, is used to cross-link one turn of the alpha helix. Suitable methods of lanthionine-based cyclization are known in the art. See, for instance, Matteucci et al., Tetrahedron Letters 45: 1399-1401 (2004); Mayer et al., J. Peptide Res. 51: 432-436 (1998); Polinsky et al., J. Med. Chem. 35: 4185-4194 (1992); Osapay et al., J. Med. Chem. 40: 2241-2251 (1997); Fukase et al., Bull. Chem. Soc. Jpn. 65: 2227-2240 (1992); Harpp et al., J. Org. Chem. 36: 73-80 (1971); Goodman and Shao, Pure Appl. Chem. 68: 1303-1308 (1996); and Osapay and Goodman, J. Chem. Soc. Chem. Commun. 1599-1600 (1993).

[0236] In some embodiments, α, ω-diaminoalkane tethers, e.g., 1,4-diaminopropane and 1,5-diaminopentane) between two Glu residues at positions i and i+7 are used to stabilize the alpha helix of the glucagon peptide. Such tethers lead to the formation of a bridge 9-atoms or more in length, depending on the length of the diaminoalkane tether. Suitable methods of producing peptides cross-linked with such tethers are described in the art. See, for example, Phelan et al., J. Am. Chem. Soc. 119: 455-460 (1997).

[0237] In yet another embodiment of the invention, a disulfide bridge is used to cross-link one or two turns of the alpha helix of the glucagon related peptide. Alternatively, a modified disulfide bridge in which one or both sulfur atoms are replaced by a methylene group resulting in an isosteric macrocyclization is used to stabilize the alpha helix of the glucagon related peptide. Suitable methods of modifying peptides with disulfide bridges or sulfur-based cyclization are described in, for example, Jackson et al., J. Am. Chem. Soc. 113: 9391-9392 (1991) and Rudinger and Jost, Experientia 20: 570-571 (1964).

[0238] In yet another embodiment, the alpha helix of the glucagon related peptide is stabilized via the binding of metal atom by two His residues or a His and Cys pair positioned at i and i+4. The metal atom can be, for example, Ru(III), Cu(II), Zn(II), or Cd(II). Such methods of metal binding-based alpha helix stabilization are known in the art. See, for example, Andrews and Tabor, Tetrahedron 55: 11711-11743 (1999); Ghadiri et al., J. Am. Chem. Soc. 112: 1630-1632 (1990); and Ghadiri et al., J. Am. Chem. Soc. 119: 9063-9064 (1997).

[0239] The alpha helix of the glucagon related peptide can alternatively be stabilized through other means of peptide cyclizing, which means are reviewed in Davies, J. Peptide. Sci. 9: 471-501 (2003). The alpha helix can be stabilized via the formation of an amide bridge, thioether bridge, thioester bridge, urea bridge, carbamate bridge, sulfonamide bridge, and the like. For example, a thioester bridge can be formed between the C-terminus and the side chain of a Cys residue. Alternatively, a thioester can be formed via side chains of amino acids having a thiol (Cys) and a carboxylic acid (e.g., Asp, Glu). In another method, a cross-linking agent, such as a dicarboxylic acid, e.g. suberic acid (octanedioic acid), etc. can introduce a link between two functional groups of an amino acid side chain, such as a free amino, hydroxyl, thiol group, and combinations thereof.

[0240] In accordance with some embodiments, the alpha helix of the glucagon related peptide is stabilized through the incorporation of hydrophobic amino acids at positions i and i+4. For instance, i can be Tyr and i+4 can be either Val or Leu; i can be Phe and i+4 can be Cys or Met; I can be Cys and i+4 can be Met; or i can be Phe and i+4 can be Ile. It should be understood that, for purposes herein, the above amino acid pairings can be reversed, such that the indicated amino acid at position i could alternatively be located at i+4, while the i+4 amino acid can be located at the i position.

[0241] In accordance with other embodiments of the invention, wherein glucagon related peptide is a peptide having glucagon agonist activity, GIP agonist activity, glucagon antagonist and GLP-1 activity, the alpha helix is stabilized through incorporation (either by amino acid substitution or insertion) of one or more alpha helix-stabilizing amino acids at the C-terminal portion of the glucagon related peptide (around amino acids 12-29 according to the numbering of the amino acid numbering of wild type glucagon). In a specific embodiment, the alpha helix-stabilizing amino acid is an α, α-disubstituted amino acid, including, but not limited to any of amino iso-butyric acid (AIB), an amino acid disubstituted with the same or a different group selected from methyl, ethyl, propyl, and n-butyl, or with a cyclooctane or cycloheptane (e.g., 1-aminocyclooctane-1-carboxylic acid). In some embodiments, one, two, three, four or more of positions 16, 17, 18, 19, 20, 21, 24 or 29 of the glucagon related peptide is substituted with an α, α-disubstituted amino acid. In a specific embodiment, one, two, three or all of positions 16, 20, 21, and 24 are substituted with AIB.

[0242] Conjugates

[0243] The present disclosure also encompasses conjugates in which a glucagon related peptide (e.g. a Class 1 glucagon related peptide, Class 2 glucagon related peptide, Class 3 glucagon related peptide, Class 4 glucagon related peptide, Class 5 glucagon related peptide, or Class 6 glucagon related peptide), is linked, optionally via covalent bonding and optionally via a linker, to a conjugate moiety. Linkage can be accomplished by covalent chemical bonds, physical forces such electrostatic, hydrogen, ionic, van der Waals, or hydrophobic or hydrophilic interactions. A variety of non-covalent coupling systems may be used, including biotin-avidin, ligand/receptor, enzyme/substrate, nucleic acid/nucleic acid binding protein, lipid/lipid binding protein, cellular adhesion molecule partners; or any binding partners or fragments thereof which have affinity for each other.

[0244] The glucagon related peptide can be linked to conjugate moieties via direct covalent linkage by reacting targeted amino acid residues of the peptide with an organic derivatizing agent that is capable of reacting with selected side chains or the N- or C-terminal residues of these targeted amino acids. Reactive groups on the peptide or conjugate moiety include, e.g., an aldehyde, amino, ester, thiol, α-haloacetyl, maleimido or hydrazino group. Derivatizing agents include, for example, maleimidobenzoyl sulfosuccinimide ester (conjugation through cysteine residues), N-hydroxysuccinimide (through lysine residues), glutaraldehyde, succinic anhydride or other agents known in the art. Alternatively, the conjugate moieties can be linked to the peptide indirectly through intermediate carriers, such as polysaccharide or polypeptide carriers. Examples of polysaccharide carriers include aminodextran. Examples of suitable polypeptide carriers include polylysine, polyglutamic acid, polyaspartic acid, co-polymers thereof, and mixed polymers of these amino acids and others, e.g., serines, to confer desirable solubility properties on the resultant loaded carrier.

[0245] Cysteinyl residues most commonly are reacted with α-haloacetates (and corresponding amines), such as chloroacetic acid or chloroacetamide, to give carboxymethyl or carboxyamidomethyl derivatives. Cysteinyl residues also are derivatized by reaction with bromotrifluoroacetone, alpha-bromo-β-(5-imidozoyl)propionic acid, chloroacetyl phosphate, N-alkylmaleimides, 3-nitro-2-pyridyl disulfide, methyl 2-pyridyl disulfide, p-chloromercuribenzoate, 2-chloromercuri-4-nitrophenol, or chloro-7-nitrobenzo-2-oxa-1,3-diazole.

[0246] Histidyl residues are derivatized by reaction with diethylpyrocarbonate at pH 5.5-7.0 because this agent is relatively specific for the histidyl side chain. Para-bromophenacyl bromide also is useful; the reaction is preferably performed in 0.1 M sodium cacodylate at pH 6.0.

[0247] Lysinyl and amino-terminal residues are reacted with succinic or other carboxylic acid anhydrides. Derivatization with these agents has the effect of reversing the charge of the lysinyl residues. Other suitable reagents for derivatizing alpha-amino-containing residues include imidoesters such as methyl picolinimidate, pyridoxal phosphate, pyridoxal, chloroborohydride, trinitrobenzenesulfonic acid, O-methylisourea, 2,4-pentanedione, and transaminase-catalyzed reaction with glyoxylate.

[0248] Arginyl residues are modified by reaction with one or several conventional reagents, among them phenylglyoxal, 2,3-butanedione, 1,2-cyclohexanedione, and ninhydrin. Derivatization of arginine residues requires that the reaction be performed in alkaline conditions because of the high pKₐ of the guanidine functional group. Furthermore, these reagents may react with the groups of lysine as well as the arginine epsilon-amino group.

[0249] The specific modification of tyrosyl residues may be made, with particular interest in introducing spectral labels into tyrosyl residues by reaction with aromatic diazonium compounds or tetranitromethane. Most commonly, N-acetylimidizole and tetranitromethane are used to form O-acetyl tyrosyl species and 3-nitro derivatives, respectively.

[0250] Carboxyl side groups (aspartyl or glutamyl) are selectively modified by reaction with carbodiimides (R—N═C═N—R′), where R and R′ are different alkyl groups, such as 1-cyclohexyl-3-(2-morpholinyl-4-ethyl) carbodiimide or 1-ethyl-3-(4-azonia-4,4-dimethylpentyl) carbodiimide. Furthermore, aspartyl and glutamyl residues are converted to asparaginyl and glutaminyl residues by reaction with ammonium ions.

[0251] Other modifications include hydroxylation of proline and lysine, phosphorylation of hydroxyl groups of seryl or threonyl residues, methylation of the alpha-amino groups of lysine, arginine, and histidine side chains (T. E. Creighton, Proteins: Structure and Molecular Properties, W.H. Freeman & Co., San Francisco, pp. 79-86 (1983)), deamidation of asparagine or glutamine, acetylation of the N-terminal amine, and/or amidation or esterification of the C-terminal carboxylic acid group.

[0252] Another type of covalent modification involves chemically or enzymatically coupling glycosides to the peptide. Sugar(s) may be attached to (a) arginine and histidine, (b) free carboxyl groups, (c) free sulfhydryl groups such as those of cysteine, (d) free hydroxyl groups such as those of serine, threonine, or hydroxyproline, (e) aromatic residues such as those of tyrosine, or tryptophan, or (f) the amide group of glutamine. These methods are described in WO87/05330 published 11 Sep. 1987, and in Aplin and Wriston, CRC Crit. Rev. Biochem., pp. 259-306 (1981).

[0253] Exemplary conjugate moieties that can be linked to any of the glucagon related peptides described herein include but are not limited to a heterologous peptide or polypeptide (including for example, a plasma protein), a targeting agent, an immunoglobulin or portion thereof (e.g. variable region, CDR, or Fc region), a diagnostic label such as a radioisotope, fluorophore or enzymatic label, a polymer including water soluble polymers, or other therapeutic or diagnostic agents. In some embodiments a conjugate is provided comprising a glucagon related peptide of the present invention and a plasma protein, wherein the plasma protein is selected from the group consisting of albumin, transferin, fibrinogen and globulins. In some embodiments the plasma protein moiety of the conjugate is albumin or transferin. In some embodiments, the linker comprises a chain of atoms from 1 to about 60, or 1 to 30 atoms or longer, 2 to 5 atoms, 2 to 10 atoms, 5 to 10 atoms, or 10 to 20 atoms long. In some embodiments, the chain atoms are all carbon atoms. In some embodiments, the chain atoms in the backbone of the linker are selected from the group consisting of C, O, N, and S. Chain atoms and linkers may be selected according to their expected solubility (hydrophilicity) so as to provide a more soluble conjugate. In some embodiments, the linker provides a functional group that is subject to cleavage by an enzyme or other catalyst or hydrolytic conditions found in the target tissue or organ or cell. In some embodiments, the length of the linker is long enough to reduce the potential for steric hindrance. If the linker is a covalent bond or a peptidyl bond and the conjugate is a polypeptide, the entire conjugate can be a fusion protein. Such peptidyl linkers may be any length. Exemplary linkers are from about 1 to 50 amino acids in length, 5 to 50, 3 to 5, 5 to 10, 5 to 15, or 10 to 30 amino acids in length. Such fusion proteins may alternatively be produced by recombinant genetic engineering methods known to one of ordinary skill in the art.

[0254] As noted above, in some embodiments, the glucagon related peptides are conjugated, e.g., fused to an immunoglobulin or portion thereof (e.g. variable region, CDR, or Fc region). Known types of immunoglobulins (Ig) include IgG, IgA, IgE, IgD or IgM. The Fc region is a C-terminal region of an Ig heavy chain, which is responsible for binding to Fc receptors that carry out activities such as recycling (which results in prolonged half-life), antibody dependent cell-mediated cytotoxicity (ADCC), and complement dependent cytotoxicity (CDC).

[0255] For example, according to some definitions the human IgG heavy chain Fc region stretches from Cys226 to the C-terminus of the heavy chain. The “hinge region” generally extends from Glu216 to Pro230 of human IgG1 (hinge regions of other IgG isotypes may be aligned with the IgG1 sequence by aligning the cysteines involved in cysteine bonding). The Fc region of an IgG includes two constant domains, CH2 and CH3. The CH2 domain of a human IgG Fc region usually extends from amino acids 231 to amino acid 341. The CH3 domain of a human IgG Fc region usually extends from amino acids 342 to 447. References made to amino acid numbering of immunoglobulins or immunoglobulin fragments, or regions, are all based on Kabat et al. 1991, Sequences of Proteins of Immunological Interest, U.S. Department of Public Health, Bethesda, Md. In a related embodiment, the Fc region may comprise one or more native or modified constant regions from an immunoglobulin heavy chain, other than CH1, for example, the CH2 and CH3 regions of IgG and IgA, or the CH3 and CH4 regions of IgE.

[0256] Suitable conjugate moieties include portions of immunoglobulin sequence that include the FcRn binding site. FcRn, a salvage receptor, is responsible for recycling immunoglobulins and returning them to circulation in blood. The region of the Fc portion of IgG that binds to the FcRn receptor has been described based on X-ray crystallography (Burmeister et al. 1994, Nature 372:379). The major contact area of the Fc with the FcRn is near the junction of the CH2 and CH3 domains. Fc-FcRn contacts are all within a single Ig heavy chain. The major contact sites include amino acid residues 248, 250-257, 272, 285, 288, 290-291, 308-311, and 314 of the CH2 domain and amino acid residues 385-387, 428, and 433-436 of the CH3 domain.

[0257] Some conjugate moieties may or may not include FcγR binding site(s). FcγR are responsible for ADCC and CDC. Examples of positions within the Fc region that make a direct contact with FcγR are amino acids 234-239 (lower hinge region), amino acids 265-269 (B/C loop), amino acids 297-299 (C′/E loop), and amino acids 327-332 (F/G) loop (Sondermann et al., Nature 406: 267-273, 2000). The lower hinge region of IgE has also been implicated in the FcRI binding (Henry, et al., Biochemistry 36, 15568-15578, 1997). Residues involved in IgA receptor binding are described in Lewis et al., (J Immunol. 175:6694-701, 2005). Amino acid residues involved in IgE receptor binding are described in Sayers et al. (J Biol Chem. 279(34):35320-5, 2004).

[0258] Amino acid modifications may be made to the Fc region of an immunoglobulin. Such variant Fc regions comprise at least one amino acid modification in the CH3 domain of the Fc region (residues 342-447) and/or at least one amino acid modification in the CH2 domain of the Fc region (residues 231-341). Mutations believed to impart an increased affinity for FcRn include T256A, T307A, E380A, and N434A (Shields et al. 2001, J. Biol. Chem. 276:6591). Other mutations may reduce binding of the Fc region to FcγRI, FcγRIIA, FcγRIIB, and/or FcγRIIIA without significantly reducing affinity for FcRn. For example, substitution of the Asn at position 297 of the Fc region with Ala or another amino acid removes a highly conserved N-glycosylation site and may result in reduced immunogenicity with concomitant prolonged half-life of the Fc region, as well as reduced binding to FcγRs (Routledge et al. 1995, Transplantation 60:847; Friend et al. 1999, Transplantation 68:1632; Shields et al. 1995, J. Biol. Chem. 276:6591). Amino acid modifications at positions 233-236 of IgG1 have been made that reduce binding to FcγRs (Ward and Ghetie 1995, Therapeutic Immunology 2:77 and Armour et al. 1999, Eur. J. Immunol. 29:2613). Some exemplary amino acid substitutions are described in U.S. Pat. Nos. 7,355,008 and 7,381,408, each incorporated by reference herein in its entirety.

[0259] rPEG

[0260] In some embodiments, the conjugate of the invention comprises a glucagon superfamily peptide, including glucagon-related peptides, osteocalcin, as well as analogs, derivatives and conjugates of the foregoing, fused to an accessory peptide which is capable of forming an extended conformation similar to chemical PEG (e.g., a recombinant PEG (rPEG) molecule), such as those described in International Patent Application Publication No. WO2009/023270 and U.S. Patent Application Publication No. US2008/0286808. The rPEG molecule is not polyethylene glycol. The rPEG molecule in some aspects is a polypeptide comprising one or more of glycine, serine, glutamic acid, aspartic acid, alanine, or proline. In some aspects, the rPEG is a homopolymer, e.g., poly-glycine, poly-serine, poly-glutamic acid, poly-aspartic acid, poly-alanine, or poly-proline. In other embodiments, the rPEG comprises two types of amino acids repeated, e.g., poly(Gly-Ser), poly(Gly-Glu), poly(Gly-Ala), poly(Gly-Asp), poly(Gly-Pro), poly(Ser-Glu), etc. In some aspects, the rPEG comprises three different types of amino acids, e.g., poly(Gly-Ser-Glu). In specific aspects, the rPEG increases the half-life of the glucagon superfamily peptide, or osteocalcin. In some aspects, the rPEG comprises a net positive or net negative charge. The rPEG in some aspects lacks secondary structure. In some embodiments, the rPEG is greater than or equal to 10 amino acids in length and in some embodiments is about 40 to about 50 amino acids in length. The accessory peptide in some aspects is fused to the N- or C-terminus of the peptide of the invention through a peptide bond or a proteinase cleavage site, or is inserted into the loops of the peptide of the invention. The rPEG in some aspects comprises an affinity tag or is linked to a PEG that is greater than 5 kDa. In some embodiments, the rPEG confers the peptide of the invention with an increased hydrodynamic radius, serum half-life, protease resistance, or solubility and in some aspects confers the peptide with decreased immunogenicity.

[0261] Fusion Peptides—C-Terminal Extension

[0262] In certain embodiments a glucagon related peptide may comprise a C-terminus or a C-terminal amino acid sequence including but not limited to: COOH, CONH₂, GPSSGAPPPS (SEQ ID NO: 710), GPSSGAPPPS-CONH₂ (SEQ ID NO: 711), a oxyntomodulin carboxy terminal extension, KRNRNNIA (SEQ ID NO: 714) or KGKKNDWKHNITQ (SEQ ID NO: 713). For example, the terminal ten amino acids of Exendin-4 (i.e. the sequence of SEQ ID NO: 710 (GPSSGAPPPS)) are linked to the carboxy terminus of the Class 1 glucagon related peptide, Class 2 glucagon related peptide, Class 3 glucagon related peptide, Class 4 glucagon related peptide, Class 5 glucagon related peptide or Class 6 glucagon related peptide of the present disclosure.

[0263] Another compound that induces weight loss is oxyntomodulin, a naturally occurring digestive hormone found in the small intestine (see Diabetes 2005; 54:2390-2395). Oxyntomodulin is a 37 amino acid peptide (SEQ ID NO: 706) that contains the 29 amino acid sequence of glucagon followed by an 8 amino acid carboxy terminal extension of SEQ ID NO: 714 (KRNRNNIA). Accordingly, in some embodiments prodrug derivatives of glucagon related peptides are provided that further comprise the carboxy terminal extension of the sequence of SEQ ID NO: 714 or a four amino acid extension having the sequence KRNR.

[0264] Glucagon modification at position 3

[0265] Glucagon Related Peptides of Classes 1 to 3 Described Herein May be modified at position 3 (according to the amino acid numbering of wild type glucagon) to maintain or increase activity at the glucagon receptor.

[0266] In some embodiments in which the glucagon related peptide is a Class 1, Class 2, Class 6, or Class 3 glucagon related peptide, maintained or enhanced activity at the glucagon receptor may be achieved by modifying the Gln at position 3 with a glutamine analog. For example, a Class 1, Class 2, Class 6, or Class 3 glucagon related peptide comprising a glutamine analog at position 3 may exhibit about 5%, about 10%, about 20%, about 50%, or about 85% or greater the activity of native glucagon (SEQ ID NO: 701) at the glucagon receptor. In some embodiments a Class 1, Class 2, Class 6, or Class 3 glucagon related peptide comprising a glutamine analog at position 3 may exhibit about 20%, about 50%, about 75%, about 100%, about 200% or about 500% or greater the activity of a corresponding glucagon peptide having the same amino acid sequence as the peptide comprising the glutamine analog, except for the modified amino acid at position 3 at the glucagon receptor. In some embodiments, a Class 1, Class 2, Class 6, or Class 3 glucagon related peptide comprising a glutamine analog at position 3 exhibits enhanced activity at the glucagon receptor, but the enhanced activity is no more than 1000%, 10,000%, 100,000%, or 1,000,000% of the activity of native glucagon or of a corresponding glucagon related peptide having the same amino acid sequence as the peptide comprising the glutamine analog, except for the modified amino acid at position 3.

[0267] In some embodiments, the glutamine analog is a naturally occurring or a non-naturally occurring amino acid comprising a side chain of Structure I, II or III:

[chemical structure]

[0268] wherein R¹ is C₀₋₃ alkyl or C₀₋₃ heteroalkyl; R² is NHR⁴ or C₁₋₃ alkyl; R³ is C₁₋₃ alkyl; R⁴ is H or C₁₋₃ alkyl; X is NH, O, or S; and Y is NHR⁴, SR³, or OR³. In some embodiments, X is NH or Y is NHR⁴. In some embodiments, R¹ is C₀₋₂ alkyl or C₁ heteroalkyl. In some embodiments, R² is NHR⁴ or C₁ alkyl. In some embodiments, R⁴ is H or C¹ alkyl. In exemplary embodiments in which the glucagon related peptide is a Class 1, Class 2, Class 6, or Class 3 glucagon related peptide, an amino acid comprising a side chain of Structure I is provided where, R¹ is CH—S, X is NH, and R² is CH₃ (acetamidomethyl-cysteine, C(Acm)); R¹ is CH₂, X is NH, and R² is CH₃ (acetyldiaminobutanoic acid, Dab(Ac)); R¹ is C₀ alkyl, X is NH, R² is NHR⁴, and R⁴ is H (carbamoyldiaminopropanoic acid, Dap(urea)); or R¹ is CH₂—CH₂, X is NH, and R² is CH₃ (acetylornithine, Orn(Ac)). In exemplary embodiments an amino acid comprising a side chain of Structure II is provided where, R¹ is CH₂, Y is NHR⁴, and R⁴ is CH₃ (methylglutamine, Q(Me)); In exemplary embodiments an amino acid comprising a side chain of Structure IIII is provided where, R¹ is CH₂ and R⁴ is H (methionine-sulfoxide, M(O)); In specific embodiments, the amino acid at position 3 is substituted with Dab(Ac).

[0269] Dimers

[0270] With regard to the Class 1, Class 2, Class 6, and Class 3 glucagon related peptides, the glucagon related peptide may be part of a dimer, trimer or higher order multimer comprising at least two, three, or more peptides bound via a linker, wherein at least one or both peptides is a glucagon related peptide. The dimer may be a homodimer or heterodimer. In some embodiments, the linker is selected from the group consisting of a bifunctional thiol crosslinker and a bi-functional amine crosslinker. In certain embodiments, the linker is PEG, e.g., a 5 kDa PEG, 20 kDa PEG. In some embodiments, the linker is a disulfide bond. For example, each monomer of the dimer may comprise a Cys residue (e.g., a terminal or internally positioned Cys) and the sulfur atom of each Cys residue participates in the formation of the disulfide bond. In some aspects of the invention, the monomers are connected via terminal amino acids (e.g., N-terminal or C-terminal), via internal amino acids, or via a terminal amino acid of at least one monomer and an internal amino acid of at least one other monomer. In specific aspects, the monomers are not connected via an N-terminal amino acid. In some aspects, the monomers of the multimer are attached together in a “tail-to-tail” orientation in which the C-terminal amino acids of each monomer are attached together. A conjugate moiety may be covalently linked to any of the glucagon related peptides described herein, including a dimer, trimer or higher order multimer.

[0271] Methods for Making Glucagon Related Peptides

[0272] The glucagon related peptides (and prodrugs) of this disclosed herein may be prepared by standard synthetic methods, recombinant DNA techniques, or any other methods of preparing peptides and fusion proteins. Although certain non-natural amino acids cannot be expressed by standard recombinant DNA techniques, techniques for their preparation are known in the art. Compounds of this invention that encompass non-peptide portions may be synthesized by standard organic chemistry reactions, in addition to standard peptide chemistry reactions when applicable.

[0273] Classes of glucagon related peptides are described in detail below. With respect to each of the sections of disclosure concerning class 1, 2, 3, 4, 5 and/or 6 glucagon related peptides modifications are described with respect to the glucagon related peptide portion (Q) of a prodrug compound detailed above. Thus, structural elements described with regard to a class of glucagon related peptides are structural elements of Q which is then further modified to generate a prodrug compound as described above.

[0274] Class 1 Glucagon Related Peptides

[0275] In certain embodiments, the glucagon related peptide is a Class 1 glucagon related peptide, which is described herein and in International Patent Application No. PCT US2009/47437 (filed on Jun. 16, 2009), International Patent Application Publication No. WO 2008/086086, published on Jul. 17, 2008, and U.S. Provisional Application No. 61/090,415, the contents of which are incorporated by reference in their entirety, and in International Application No. PCT/US11/41623 filed 23 Jun. 2011 and U.S. Provisional Application No. 61/358,710, the contents of which are incorporated by reference in their entirety.

[0276] The biological sequences referenced in the following section (SEQ ID NOs: 801-915) relating to Class 1 glucagon related peptides correspond to SEQ ID NOs: 1-115 in International Patent Application No. PCT US2009/47437.

[0277] Activity

[0278] Class 1 glucagon peptides retain glucagon receptor activity relative to the native glucagon peptide (SEQ ID NO: 801). For example, the glucagon peptide can retain at least 10%, 20%, 30%, 40%, 50%, 60%, 70%, 75% activity, 80% activity, 85% activity, or 90% of the activity of native glucagon (calculated as the inverse ratio of EC50s for the glucagon peptide vs. glucagon, e.g., as measured by cAMP production using the assay generally described in the examples). In some embodiments, the Class 1 glucagon related peptides have the same or greater activity (used synonymously with the term “potency” herein) than glucagon. In some embodiments, the glucagon peptides described herein exhibit no more than about 100%, 1000%, 10,000%, 100,000%, or 1,000,000% of the activity of native glucagon peptide.

[0279] Any of the Class 1 glucagon related peptides described herein may exhibit an EC50 at the human glucagon receptor of about 100 nM, 75 nM, 50 nM, 40 nM, 30 nM, 20 nM, 10 nM, 5 nM, 1 nM or less when tested for cAMP induction in HEK293 cells over-expressing glucagon receptor, e.g. using the assay of Example 5. Typically pegylated peptides will exhibit a higher EC50 compared to the unpegylated peptide. For example, the Class 1 glucagon related peptides described herein, when unpegylated, may exhibit activity at the glucagon receptor which is at least 20% (e.g., at least 30%, at least 40%, at least 50%, at least 60%, at least 75%, at least 80%, at least 90% at least 95%, at least 98%, at least 99%, 100%, 150%, 200%, 400%, 500% or more) of the activity of native glucagon (SEQ ID NO: 801) at the glucagon receptor. In certain embodiments, the Class 1 glucagon related peptides described herein exhibit the indicated % activity of native glucagon at the glucagon receptor, when lacking a hydrophilic moiety, but exhibit a decreased % activity of native glucagon at the glucagon receptor, when comprising a hydrophilic moiety. For example, the Class 1 glucagon related peptides described herein, when pegylated, may exhibit activity at the glucagon receptor which is at least 2% (e.g. at least 3%, at least 4%, at least 5%, at least 6%, at least 7%, at least 8%, at least 9%, or at least 10% of the activity of native glucagon. In some embodiments, the Class 1 glucagon related peptides described herein may exhibit any of the above indicated activities but no more than 1000%, 10,000%, 100,000%, or 1,000,000% of the activity of native glucagon at the glucagon receptor.

[0280] In some embodiments, the Class 1 glucagon related peptides exhibit less than about 5%, 4%, 3%, 2% or 1% of the activity of native GLP-1 at the GLP-1 receptor and/or a greater than about 5-fold, 10-fold, or 15-fold selectivity for glucagon receptor compared to GLP-1 receptor. For example, in some embodiments, the Class 1 glucagon related peptides exhibit less than 5% of the activity of native GLP-1 at the GLP-1 receptor and exhibit a greater than 5-fold selectivity for glucagon receptor compared to GLP-1 receptor.

[0281] Improved Solubility

[0282] Native glucagon exhibits poor solubility in aqueous solution, particularly at physiological pH, with a tendency to aggregate and precipitate over time. In contrast, the Class 1 glucagon related peptides in some embodiments exhibit at least 2-fold, 5-fold, or even higher solubility compared to native glucagon at a pH between 6 and 8, or between 6 and 9, for example, at pH 7 after 24 hours at 25° C.

[0283] Accordingly, in some embodiments, a Class 1 glucagon related peptide has been modified relative to the wild type peptide of His-Ser-Gln-Gly-Thr-Phe-Thr-Ser-Asp-Tyr-Ser-Lys-Tyr-Leu-Asp-Ser-Arg-Arg-Ala-Gln-Asp-Phe-Val-Gln-Trp-Leu-Met-Asn-Thr (SEQ ID NO: 801) to improve the peptide's solubility in aqueous solutions, particularly at a pH ranging from about 5.5 to about 8.0, while retaining the native peptide's biological activity.

[0284] For example, the solubility of any of the Class 1 glucagon related peptides described herein can be further improved by attaching a hydrophilic moiety to the peptide. Introduction of such groups also increases duration of action, e.g. as measured by a prolonged half-life in circulation. Hydrophilic moieties are further described herein.

[0285] Modification with Charged Residues

[0286] In some embodiments, solubility is improved by adding charge to the Class 1 glucagon related peptide by the substitution of native non-charged amino acids with charged amino acids selected from the group consisting of lysine, arginine, histidine, aspartic acid and glutamic acid, or by the addition of charged amino acids to the amino or carboxy terminus of the peptide.

[0287] In accordance with some embodiments, the Class 1 glucagon related peptide has improved solubility due to the fact that the peptide is modified by amino acid substitutions and/or additions that introduce a charged amino acid into the C-terminal portion of the peptide, and in some embodiments at a position C-terminal to position 27 of SEQ ID NO: 801. Optionally, one, two or three charged amino acids may be introduced within the C-terminal portion, and in some embodiments C-terminal to position 27. In accordance with some embodiments, the native amino acid(s) at positions 28 and/or 29 are substituted with a charged amino acid, and/or one to three charged amino acids are added to the C-terminus of the peptide, e.g. after position 27, 28 or 29. In exemplary embodiments, one, two, three or all of the charged amino acids are negatively charged. In other embodiments, one, two, three or all of the charged amino acids are positively charged.

[0288] In specific exemplary embodiments, the Class 1 glucagon related peptide may comprise any one or two of the following modifications: substitution of N28 with E; substitution of N28 with D; substitution of T29 with D; substitution of T29 with E; insertion of E after position 27, 28 or 29; insertion of D after position 27, 28 or 29. For example, D28E29, E28E29, E29E30, E28E30, D28E30.

[0289] In accordance with one exemplary embodiment, the Class 1 glucagon related peptide comprises an amino acid sequence of SEQ ID NO: 811, or an analog thereof that contains 1 to 3 further amino acid modifications (described herein in reference to glucagon agonists) relative to native glucagon, or a glucagon agonist analog thereof. SEQ ID NO: 811 represents a modified Class 1 glucagon related peptide, wherein the asparagine residue at position 28 of the native protein has been substituted with an aspartic acid. In another exemplary embodiment the Class 1 glucagon related peptide comprises an amino acid sequence of SEQ ID NO: 838, wherein the asparagine residue at position 28 of the native protein has been substituted with glutamic acid. Other exemplary embodiments include Class 1 glucagon related peptides of SEQ ID NOS: 824, 825, 826, 833, 835, 836 and 837.

[0290] Substituting the normally occurring amino acid at position 28 and/or 29 with charged amino acids, and/or the addition of one to two charged amino acids at the carboxy terminus of the Class 1 glucagon related peptide, enhances the solubility and stability of the glucagon peptides in aqueous solutions at physiologically relevant pHs (i.e., a pH of about 6.5 to about 7.5) by at least 5-fold and by as much as 30-fold. Accordingly, Class 1 glucagon peptides of some embodiments retain glucagon activity and exhibit at least 2-fold, 5-fold, 10-fold, 15-fold, 25-fold, 30-fold or greater solubility relative to native glucagon at a given pH between about 5.5 and 8, e.g., pH 7, when measured after 24 hours at 25° C.

[0291] Additional modifications, e.g. conservative substitutions, which modifications are further described herein, may be made to the Class 1 glucagon related peptide that still allow it to retain glucagon activity.

[0292] Improved Stability

[0293] Any of the Class 1 glucagon peptides may additionally exhibit improved stability and/or reduced degradation, for example, retaining at least 95% of the original peptide after 24 hours at 25° C. Any of the Class 1 glucagon related peptides disclosed herein may additionally exhibit improved stability at a pH within the range of 5.5 to 8, for example, retaining at least 75%, 80%, 90%, 95%, 96%, 97%, 98% or 99% of the original peptide after 24 hours at 25° C. In some embodiments, the Class 1 glucagon related peptides of the invention exhibit improved stability, such that at least 75% (e.g., at least 80%, at least 85%, at least 90%, at least 95%, more than 95%, up to 100%) of a concentration of the peptide or less than about 25% (e.g., less than 20%, less than 15%, less than 10%, less than 5%, 4%, 3%, 2%, 1%, down to 0%) of degraded peptide is detectable at 280 nm by an ultraviolet (UV) detector after about 1 or more weeks (e.g., about 2 weeks, about 4 weeks, about 1 month, about two months, about four months, about six months, about eight months, about ten months, about twelve months) in solution at a temperature of at least 20° C. (e.g., 21° C., 22° C., 23° C., 24° C., 25° C., 26° C., at least 27.5° C., at least 30° C., at least 35° C., at least 40° C., at least 50° C.) and less than 100° C., less than 85° C., less than 75° C., or less than 70° C. The Class 1 glucagon related peptides may include additional modifications that alter its pharmaceutical properties, e.g. increased potency, prolonged half-life in circulation, increased shelf-life, reduced precipitation or aggregation, and/or reduced degradation, e.g., reduced occurrence of cleavage or chemical modification after storage.

[0294] In yet further exemplary embodiments, any of the foregoing Class 1 glucagon related peptides can be further modified to improve stability by modifying the amino acid at position 15 of SEQ ID NO: 801 to reduce degradation of the peptide over time, especially in acidic or alkaline buffers. In exemplary embodiments, Asp at position 15 is substituted with a Glu, homo-Glu, cysteic acid, or homo-cysteic acid.

[0295] Alternatively, any of the Class 1 glucagon related peptides described herein can be further modified to improve stability by modifying the amino acid at position 16 of SEQ ID NO: 801. In exemplary embodiments, Ser at position 16 is substituted with Thr or AIB, or any of the amino acids substitutions described herein with regard to Class 1 glucagon related peptides which enhance potency at the glucagon receptor. Such modifications reduce cleavage of the peptide bond between Asp15-Ser16.

[0296] In some embodiments, any of the Class 1 glucagon related peptides described herein can be further modified to reduce degradation at various amino acid positions by modifying any one, two, three, or all four of positions 20, 21, 24, or 27. Exemplary embodiments include substitution of Gln at position 20 with Ser, Thr, Ala or AIB, substitution of Asp at position 21 with Glu, substitution of Gln at position 24 with Ala or AIB, substitution of Met at position 27 with Leu or Nle. Removal or substitution of methionine reduces degradation due to oxidation of the methionine. Removal or substitution of Gln or Asn reduces degradation due to deamidation of Gln or Asn. Removal or substitution of Asp reduces degradation that occurs through dehydration of Asp to form a cyclic succinimide intermediate followed by isomerization to iso-aspartate.

[0297] Enhanced Potency

[0298] In accordance with another embodiment, Class 1 glucagon related peptides are provided that have enhanced potency at the glucagon receptor, wherein the peptides comprise an amino acid modification at position 16 of native glucagon (SEQ ID NO: 801). By way of nonlimiting example, such enhanced potency can be provided by substituting the naturally occurring serine at position 16 with glutamic acid or with another negatively charged amino acid having a side chain with a length of 4 atoms, or alternatively with any one of glutamine, homoglutamic acid, or homocysteic acid, or a charged amino acid having a side chain containing at least one heteroatom, (e.g. N, O, S, P) and with a side chain length of about 4 (or 3-5) atoms. Substitution of serine at position 16 with glutamic acid enhances glucagon activity at least 2-fold, 4-fold, 5-fold and up to 10-fold greater at the glucagon receptor. In some embodiments, the Class 1 glucagon related peptide retains selectivity for the glucagon receptor relative to the GLP-1 receptors, e.g., at least 5-fold, 10-fold, or 15-fold selectivity.

[0299] DPP-IV Resistance

[0300] In some embodiments, the Class 1 glucagon peptides disclosed herein are further modified at position 1 or 2 to reduce susceptibility to cleavage by dipeptidyl peptidase IV. More particularly, in some embodiments, position 1 and/or position 2 of the Class 1 glucagon related peptide is substituted with the DPP-IV resistant amino acid(s) described herein. In some embodiments, position 2 of the analog peptide is substituted with an amino isobutyric acid. In some embodiments, position 2 of the analog peptide is substituted with an amino acid selected from the group consisting of D-serine, D-alanine, glycine, N-methyl serine, and ε-amino butyric acid. In another embodiment, position 2 of the Class 1 glucagon related peptide is substituted with an amino acid selected from the group consisting of D-serine, glycine, and aminoisobutyric acid. In some embodiments, the amino acid at position 2 is not D-serine.

[0301] Reduction in glucagon activity upon modification of the amino acids at position 1 and/or position 2 of the glucagon peptide can be restored by stabilization of the alpha-helix structure in the C-terminal portion of the glucagon peptide (around amino acids 12-29). The alpha helix structure can be stabilized by, e.g., formation of a covalent or non-covalent intramolecular bridge (e.g., a lactam bridge between side chains of amino acids at positions “i” and “i+4”, wherein i is an integer from 12 to 25), substitution and/or insertion of amino acids around positions 12-29 with an alpha helix-stabilizing amino acid (e.g., an α,α-disubstituted amino acid), as further described herein.

[0302] Modifications at Position 3

[0303] Glucagon receptor activity can be reduced by an amino acid modification at position 3 (according to the amino acid numbering of wild type glucagon), e.g. substitution of the naturally occurring glutamine at position 3, with an acidic, basic, or a hydrophobic amino acid. For example substitution at position 3 with glutamic acid, ornithine, or norleucine substantially reduces or destroys glucagon receptor activity.

[0304] Maintained or enhanced activity at the glucagon receptor may be achieved by modifying the Gln at position 3 with a glutamine analog as described herein. For example, glucagon agonists can comprise the amino acid sequence of SEQ ID NO: 863, SEQ ID NO: 869, SEQ ID NO: 870, SEQ ID NO: 871, SEQ ID NO: 872, SEQ ID NO: 873, and SEQ ID NO: 874.

[0305] Enhancing GLP-1 Activity with C-Terminal Amides and Esters

[0306] Enhanced activity at the GLP-1 receptor is provided by replacing the carboxylic acid of the C-terminal amino acid with a charge-neutral group, such as an amide or ester. Conversely, retaining the native carboxylic acid at the C-terminus of the peptide maintains the relatively greater selectivity of the Class 1 glucagon related peptide for the glucagon receptor vs. the GLP-1 receptor (e.g., greater than about 5, 6, 7, 8, 9, 10, 11, 12, 13, 14, 15, 16, 17, 18, 19, or 20-fold).

[0307] Further Modifications and Combinations

[0308] Additional modifications may be made to the Class 1 glucagon related peptide which may further increase solubility and/or stability and/or glucagon activity. The Class 1 glucagon related peptide may alternatively comprise other modifications that do not substantially affect solubility or stability, and that do not substantially decrease glucagon activity. In exemplary embodiments, the Class 1 glucagon related peptide may comprise a total of up to 11, or up to 12, or up to 13, or up to 14 amino acid modifications relative to the native glucagon sequence. For example, conservative or non-conservative substitutions, additions or deletions may be carried out at any of positions 2, 5, 7, 10, 11, 12, 13, 14, 17, 18, 19, 20, 21, 24, 27, 28 or 29.

[0309] Exemplary modifications of the Class 1 glucagon related peptide include but are not limited to:

[0310] (a) non-conservative substitutions, conservative substitutions, additions or deletions while retaining at least partial glucagon agonist activity, for example, conservative substitutions at one or more of positions 2, 5, 7, 10, 11, 12, 13, 14, 16, 17, 18, 19, 20, 21, 24, 27, 28 or 29, substitution of Tyr at position 10 with Val or Phe, substitution of Lys at position 12 with Arg, substitution of one or more of these positions with Ala;

[0311] (b) deletion of amino acids at positions 29 and/or 28, and optionally position 27, while retaining at least partial glucagon agonist activity;

[0312] (c) modification of the aspartic acid at position 15, for example, by substitution with glutamic acid, homoglutamic acid, cysteic acid or homocysteic acid, which may reduce degradation; or modification of the serine at position 16, for example, by substitution of threonine, AIB, glutamic acid or with another negatively charged amino acid having a side chain with a length of 4 atoms, or alternatively with any one of glutamine, homoglutamic acid, or homocysteic acid, which likewise may reduce degradation due to cleavage of the Asp15-Ser16 bond;

[0313] (d) addition of a hydrophilic moiety such as the water soluble polymer polyethylene glycol, as described herein, e.g. at position 16, 17, 20, 21, 24, 29, 40 or at the C-terminal amino acid, which may increase solubility and/or half-life;

[0314] (e) modification of the methionine at position 27, for example, by substitution with leucine or norleucine, to reduce oxidative degradation;

[0315] (f) modification of the Gln at position 20 or 24, e.g. by substitution with Ser, Thr, Ala or AIB, to reduce degradation that occurs through deamidation of Gln

[0316] (g) modification of Asp at position 21, e.g. by substitution with Glu, to reduce degradation that occurs through dehydration of Asp to form a cyclic succinimide intermediate followed by isomerization to iso-aspartate;

[0317] (h) modifications at position 1 or 2 as described herein that improve resistance to DPP-IV cleavage, optionally in combination with an intramolecular bridge such as a lactam bridge between positions “i” and “i+4”, wherein i is an integer from 12 to 25, e.g., 12, 16, 20, 24;

[0318] (i) acylating or alkylating the glucagon peptide as described herein, which may increase the activity at the glucagon receptor and/or the GLP-1 receptor, increase half-life in circulation and/or extending the duration of action and/or delaying the onset of action, optionally combined with addition of a hydrophilic moiety, additionally or alternatively, optionally combined with a modification which selectively reduces activity at the GLP-1 peptide, e.g., a modification of the Thr at position 7, such as a substitution of the Thr at position 7 with an amino acid lacking a hydroxyl group, e.g., Abu or Ile; deleting amino acids C-terminal to the amino acid at position 27 (e.g., deleting one or both of the amino acids at positions 28 and 29, yielding a peptide 27 or 28 amino acids in length);

[0319] (j) C-terminal extensions as described herein;

[0320] (k) homodimerization or heterodimerization as described herein; and combinations of the (a) through (k).

[0321] In some embodiments, exemplary modifications of the Class 1 glucagon related peptide include at least one amino acid modification selected from Group A and one or more amino acid modifications selected from Group B and/or Group C,

[0322] wherein Group A is:

[0323] substitution of Asn at position 28 with a charged amino acid;

[0324] substitution of Asn at position 28 with a charged amino acid selected from the group consisting of Lys, Arg, His, Asp, Glu, cysteic acid, and homocysteic acid;

[0325] substitution at position 28 with Asn, Asp, or Glu;

[0326] substitution at position 28 with Asp;

[0327] substitution at position 28 with Glu;

[0328] substitution of Thr at position 29 with a charged amino acid;

[0329] substitution of Thr at position 29 with a charged amino acid selected from the group consisting of Lys, Arg, His, Asp, Glu, cysteic acid, and homocysteic acid;

[0330] substitution at position 29 with Asp, Glu, or Lys;

[0331] substitution at position 29 with Glu;

[0332] insertion of 1-3 charged amino acids after position 29;

[0333] insertion after position 29 of Glu or Lys;

[0334] insertion after position 29 of Gly-Lys or Lys-Lys;

[0335] or combinations thereof;

[0336] wherein Group B is:

[0337] substitution of Asp at position 15 with Glu;

[0338] substitution of Ser at position 16 with Thr or AIB;

[0339] and wherein Group C is:

[0340] substitution of His at position 1 with a non-native amino acid that reduces susceptibility of the glucagon peptide to cleavage by dipeptidyl peptidase IV (DPP-IV),

[0341] substitution of Ser at position 2 with a non-native amino acid that reduces susceptibility of the glucagon peptide to cleavage by dipeptidyl peptidase IV (DPP-IV),

[0342] substitution of Lys at position 12 with Arg;

[0343] substitution of Gln at position 20 with Ser, Thr, Ala or AIB;

[0344] substitution of Asp at position 21 with Glu;

[0345] substitution of Gln at position 24 with Ser, Thr, Ala or AIB;

[0346] substitution of Met at position 27 with Leu or Nle;

[0347] deletion of amino acids at positions 27-29;

[0348] deletion of amino acids at positions 28-29;

[0349] deletion of the amino acid at positions 29;

[0350] or combinations thereof.

[0351] In exemplary embodiments, Lys at position 12 is substituted with Arg. In other exemplary embodiments amino acids at positions 29 and/or 28, and optionally at position 27, are deleted.

[0352] In some specific embodiments, the glucagon peptide comprises (a) an amino acid modification at position 1 and/or 2 that confers DPP-IV resistance, e.g., substitution with DMIA at position 1, or AIB at position 2, (b) an intramolecular bridge within positions 12-29, e.g. at positions 16 and 20, or one or more substitutions of the amino acids at positions 16, 20, 21, and 24 with an α,α disubstituted amino acid, optionally (c) linked to a hydrophilic moiety such as PEG, e.g., through Cys at position 24, 29 or at the C-terminal amino acid, optionally (d) an amino acid modification at position 27 that substitutes Met with, e.g., Nle, optionally (e) amino acid modifications at positions 20, 21 and 24 that reduce degradation, and optionally (f) linked to SEQ ID NO: 820. When the glucagon peptide is linked to SEQ ID NO: 820, the amino acid at position 29 in certain embodiments is Thr or Gly. In other specific embodiments, the glucagon peptide comprises (a) Asp28Glu29, or Glu28Glu29, or Glu29Glu30, or Glu28Glu30 or Asp28Glu30, and optionally (b) an amino acid modification at position 16 that substitutes Ser with, e.g. Thr or AIB, and optionally (c) an amino acid modification at position 27 that substitutes Met with, e.g., Nle, and optionally (d) amino acid modifications at positions 20, 21 and 24 that reduce degradation. In a specific embodiment, the glucagon peptide is T16, A20, E21, A24, Nle27, D28, E29.

[0353] In some embodiments, the Class 1 glucagon related peptide comprises the amino acid sequence:

(SEQ ID NO: 839)

X1-X2-Gln-Gly-Thr-Phe-Thr-Ser-Asp-Tyr-Ser-Lys-Tyr-
Leu-Asp-Ser-Arg-Arg-Ala-Gln-Asp-Phe-Val-Gln-Trp-
Leu-Met-Z

with 1 to 3 amino acid modifications thereto,

[0354] wherein X1 and/or X2 is a non-native amino acid that reduces susceptibility of (or increases resistance of) the glucagon peptide to cleavage by dipeptidyl peptidase IV (DPP-IV),

[0355] wherein Z is selected from the group consisting of —COOH (the naturally occurring C-terminal carboxylate), -Asn-COOH, Asn-Thr-COOH, and Y—COOH, wherein Y is 1 to 2 amino acids, and

[0356] wherein an intramolecular bridge, preferably a covalent bond, connects the side chains of an amino acid at position i and an amino acid at position i+4, wherein i is 12, 16, 20 or 24.

[0357] In some embodiments, the intramolecular bridge is a lactam bridge. In some embodiments, the amino acids at positions i and i+4 of SEQ ID NO: 839 are Lys and Glu, e.g., Glu16 and Lys20. In some embodiments, X1 is selected from the group consisting of: D-His, N-methyl-His, alpha-methyl-His, imidazole acetic acid, des-amino-His, hydroxyl-His, acetyl-His, homo-His, and alpha, alpha-dimethyl imidiazole acetic acid (DMIA). In other embodiments, X2 is selected from the group consisting of: D-Ser, D-Ala, Gly, N-methyl-Ser, Val, and alpha, amino isobutyric acid (AIB). In some embodiments, the glucagon peptide is covalently linked to a hydrophilic moiety at any of amino acid positions 16, 17, 20, 21, 24, 29, 40, within a C-terminal extension, or at the C-terminal amino acid. In exemplary embodiments, this hydrophilic moiety is covalently linked to a Lys, Cys, Orn, homocysteine, or acetyl-phenylalanine residue at any of these positions. Exemplary hydrophilic moieties include polyethylene glycol (PEG), for example, of a molecular weight of about 1,000 Daltons to about 40,000 Daltons, or about 20,000 Daltons to about 40,000 Daltons.

[0358] In other embodiments, the Class I glucagon related peptide comprises the amino acid sequence:

(SEQ ID NO: 839)

X1-X2-Gln-Gly-Thr-Phe-Thr-Ser-Asp-Tyr-Ser-Lys-Tyr-
Leu-Asp-Ser-Arg-Arg-Ala-Gln-Asp-Phe-Val-Gln-Trp-
Leu-Met-Z,

[0359] wherein X1 and/or X2 is a non-native amino acid that reduces susceptibility of (or increases resistance of) the glucagon peptide to cleavage by dipeptidyl peptidase IV (DPP-IV),

[0360] wherein one, two, three, four or more of positions 16, 20, 21, and 24 of the glucagon peptide is substituted with an α, α-disubstituted amino acid, and

[0361] wherein Z is selected from the group consisting of —COOH (the naturally occurring C-terminal carboxylate), -Asn-COOH, Asn-Thr-COOH, and Y—COOH, wherein Y is 1 to 2 amino acids.

[0362] Exemplary further amino acid modifications to the foregoing Class 1 glucagon related peptides or analogs include substitution of Thr at position 7 with an amino acid lacking a hydroxyl group, e.g., aminobutyric acid (Abu), Ile, optionally, in combination with substitution or addition of an amino acid comprising a side chain covalently attached (optionally, through a spacer) to an acyl or alkyl group, which acyl or alkyl group is non-native to a naturally-occurring amino acid, substitution of Lys at position 12 with Arg; substitution of Asp at position 15 with Glu; substitution of Ser at position 16 with Thr or AIB; substitution of Gln at position 20 with Ser, Thr, Ala or AIB; substitution of Asp at position 21 with Glu; substitution of Gln at position 24 with Ser, Thr, Ala or AIB; substitution of Met at position 27 with Leu or Nle; substitution of Asn at position 28 with a charged amino acid; substitution of Asn at position 28 with a charged amino acid selected from the group consisting of Lys, Arg, His, Asp, Glu, cysteic acid, and homocysteic acid; substitution at position 28 with Asn, Asp, or Glu; substitution at position 28 with Asp; substitution at position 28 with Glu; substitution of Thr at position 29 with a charged amino acid; substitution of Thr at position 29 with a charged amino acid selected from the group consisting of Lys, Arg, His, Asp, Glu, cysteic acid, and homocysteic acid; substitution at position 29 with Asp, Glu, or Lys; substitution at position 29 with Glu; insertion of 1-3 charged amino acids after position 29; insertion at position 30 (i.e., after position 29) of Glu or Lys; optionally with insertion at position 31 of Lys; addition of SEQ ID NO: 820 to the C-terminus, optionally, wherein the amino acid at position 29 is Thr or Gly; substitution or addition of an amino acid covalently attached to a hydrophilic moiety; or a combination thereof.

[0363] Any of the modifications described above in reference to Class 1 glucagon agonists which increase glucagon receptor activity, retain partial glucagon receptor activity, improve solubility, increase stability, or reduce degradation can be applied to Class 1 glucagon peptides individually or in combination. Thus, Class 1 glucagon related peptides can be prepared that retain at least 20% of the activity of native glucagon at the glucagon receptor, and which are soluble at a concentration of at least 1 mg/mL at a pH between 6 and 8 or between 6 and 9, (e.g. pH 7), and optionally retain at least 95% of the original peptide (e.g. 5% or less of the original peptide is degraded or cleaved) after 24 hours at 25° C. Alternatively, high potency Class 1 glucagon peptides can be prepared that exhibit at least about 100%, 125%, 150%, 175%, 200%, 250%, 300%, 350%, 400%, 450%, 500%, 600%, 700%, 800%, 900% or 10-fold or more of the activity of native glucagon at the glucagon receptor, and optionally are soluble at a concentration of at least 1 mg/mL at a pH between 6 and 8 or between 6 and 9, (e.g. pH 7), and optionally retains at least 95% of the original peptide (e.g. 5% or less of the original peptide is degraded or cleaved) after 24 hours at 25° C. In some embodiments, the Class 1 glucagon peptides described herein may exhibit at least any of the above indicated relative levels of activity at the glucagon receptor but no more than 10,000%, 100,000% or 1,000,000% of the activity of native glucagon at the glucagon receptor.

[0364] Examples of Embodiments of Class 1 Glucagon Related Peptides

[0365] In accordance with some embodiments the native glucagon peptide of SEQ ID NO: 801 is modified by the substitution of the native amino acid at position 28 and/or 29 with a negatively charged amino acid (e.g., aspartic acid or glutamic acid) and optionally the addition of a negatively charged amino acid (e.g., aspartic acid or glutamic acid) to the carboxy terminus of the peptide. In an alternative embodiment the native glucagon peptide of SEQ ID NO: 801 is modified by the substitution of the native amino acid at position 29 with a positively charged amino acid (e.g., lysine, arginine or histidine) and optionally the addition of one or two positively charged amino acid (e.g., lysine, arginine or histidine) on the carboxy terminus of the peptide. In accordance with some embodiments a glucagon analog having improved solubility and stability is provided wherein the analog comprises the amino acid sequence of SEQ ID NO: 834 with the proviso that at least one amino acids at position, 28, or 29 is substituted with an acidic amino acid and/or an additional acidic amino acid is added at the carboxy terminus of SEQ ID NO: 834. In some embodiments the acidic amino acids are independently selected from the group consisting of Asp, Glu, cysteic acid and homocysteic acid.

[0366] In accordance with some embodiments a glucagon agonist having improved solubility and stability is provided wherein the agonist comprises the amino acid sequence of SEQ ID NO: 833, wherein at least one of the amino acids at positions 27, 28 or 29 is substituted with a non-native amino acid residue (i.e. at least one amino acid present at position 27, 28 or 29 of the analog is an acid amino acid different from the amino acid present at the corresponding position in SEQ ID NO: 801). In accordance with some embodiments a glucagon agonist is provided comprising the sequence of SEQ ID NO: 833 with the proviso that when the amino acid at position 28 is asparagine and the amino acid at position 29 is threonine, the peptide further comprises one to two amino acids, independently selected from the group consisting of Lys, Arg, His, Asp or Glu, added to the carboxy terminus of the glucagon peptide.

[0367] It has been reported that certain positions of the native glucagon peptide can be modified while retaining at least some of the activity of the parent peptide. Accordingly, applicants anticipate that one or more of the amino acids located at positions at positions 2, 5, 7, 10, 11, 12, 13, 14, 16, 17, 18, 19, 20, 21, 24, 27, 28 or 29 of the peptide of SEQ ID NO: 811 can be substituted with an amino acid different from that present in the native glucagon peptide, and still retain the enhanced potency, physiological pH stability and biological activity of the parent glucagon peptide. For example, in accordance with some embodiments the methionine residue present at position 27 of the native peptide is changed to leucine or norleucine to prevent oxidative degradation of the peptide.

[0368] In some embodiments a glucagon analog of SEQ ID NO: 833 is provided wherein 1 to 6 amino acids, selected from positions 1, 2, 5, 7, 10, 11, 12, 13, 14, 16, 17, 18, 19, 20, 21 or 24 of the analog differ from the corresponding amino acid of SEQ ID NO: 801. In accordance with another embodiment a glucagon analog of SEQ ID NO: 833 is provided wherein 1 to 3 amino acids selected from positions 1, 2, 5, 7, 10, 11, 12, 13, 14, 16, 17, 18, 19, 20, 21 or 24 of the analog differ from the corresponding amino acid of SEQ ID NO: 801. In another embodiment, a glucagon analog of SEQ ID NO: 807, SEQ ID NO: 808 or SEQ ID NO: 834 is provided wherein 1 to 2 amino acids selected from positions 1, 2, 5, 7, 10, 11, 12, 13, 14, 16, 17, 18, 19, 20, 21 or 24 of the analog differ from the corresponding amino acid of SEQ ID NO: 801, and in a further embodiment those one to two differing amino acids represent conservative amino acid substitutions relative to the amino acid present in the native sequence (SEQ ID NO: 801). In some embodiments a glucagon peptide of SEQ ID NO: 811 or SEQ ID NO: 813 is provided wherein the glucagon peptide further comprises one, two or three amino acid substitutions at positions selected from positions 2, 5, 7, 10, 11, 12, 13, 14, 16, 17, 18, 19, 20, 21, 24, 27 or 29. In some embodiments the substitutions at positions 2, 5, 7, 10, 11, 12, 13, 14, 16, 17, 18, 19, 20, 27 or 29 are conservative amino acid substitutions.

[0369] In some embodiments a glucagon agonist is provided comprising an analog peptide of SEQ ID NO: 801 wherein the analog differs from SEQ ID NO: 801 by having an amino acid other than serine at position 2 and by having an acidic amino acid substituted for the native amino acid at position 28 or 29 or an acidic amino acid added to the carboxy terminus of the peptide of SEQ ID NO: 801. In some embodiments the acidic amino acid is aspartic acid or glutamic acid. In some embodiments a glucagon analog of SEQ ID NO: 809, SEQ ID NO: 812, SEQ ID NO: 813 or SEQ ID NO: 832 is provided wherein the analog differs from the parent molecule by a substitution at position 2. More particularly, position 2 of the analog peptide is substituted with an amino acid selected from the group consisting of D-serine, alanine, D-alanine, glycine, n-methyl serine and amino isobutyric acid.

[0370] In another embodiment a glucagon agonist is provided comprising an analog peptide of SEQ ID NO: 801 wherein the analog differs from SEQ ID NO: 801 by having an amino acid other than histidine at position 1 and by having an acidic amino acid substituted for the native amino acid at position 28 or 29 or an acidic amino acid added to the carboxy terminus of the peptide of SEQ ID NO: 801. In some embodiments the acidic amino acid is aspartic acid or glutamic acid. In some embodiments a glucagon analog of SEQ ID NO: 809, SEQ ID NO: 812, SEQ ID NO: 813 or SEQ ID NO: 832 is provided wherein the analog differs from the parent molecule by a substitution at position 1. More particularly, position 1 of the analog peptide is substituted with an amino acid selected from the group consisting of DMIA, D-histidine, desaminohistidine, hydroxyl-histidine, acetyl-histidine and homo-histidine.

[0371] In accordance with some embodiments the modified glucagon peptide comprises a sequence selected from the group consisting of SEQ ID NO: 809, SEQ ID NO: 812, SEQ ID NO: 813 and SEQ ID NO: 832. In a further embodiment a glucagon peptide is provided comprising a sequence of SEQ ID NO: 809, SEQ ID NO: 812, SEQ ID NO: 813 or SEQ ID NO: 832 further comprising one to two amino acids, added to the C-terminus of SEQ ID NO: 809, SEQ ID NO: 812, SEQ ID NO: 813 or SEQ ID NO: 832, wherein the additional amino acids are independently selected from the group consisting of Lys, Arg, His, Asp Glu, cysteic acid or homocysteic acid. In some embodiments the additional amino acids added to the carboxy terminus are selected from the group consisting of Lys, Arg, His, Asp or Glu or in a further embodiment the additional amino acids are Asp or Glu.

[0372] In another embodiment the glucagon peptide comprises the sequence of SEQ ID NO: 7 or a glucagon agonist analog thereof. In some embodiments the peptide comprising a sequence selected from the group consisting of SEQ ID NO: 808, SEQ ID NO: 810, SEQ ID NO: 811, SEQ ID NO: 812 and SEQ ID NO: 813. In another embodiment the peptide comprising a sequence selected from the group consisting of SEQ ID NO: 808, SEQ ID NO: 810 and SEQ ID NO: 811. In some embodiments the glucagon peptide comprises the sequence of SEQ ID NO: 808, SEQ ID NO: 810 and SEQ ID NO: 811 further comprising an additional amino acid, selected from the group consisting of Asp and Glu, added to the C-terminus of the glucagon peptide. In some embodiments the glucagon peptide comprises the sequence of SEQ ID NO: 811 or SEQ ID NO: 813, and in a further embodiment the glucagon peptide comprises the sequence of SEQ ID NO: 811.

[0373] In accordance with some embodiments a glucagon agonist is provided comprising a modified glucagon peptide selected from the group consisting of:

(SEQ ID NO: 834)

NH₂-His-Ser-Gln-Gly-Thr-Phe-Thr-Ser-Asp-Tyr-Ser-
Lys-Tyr-Leu-Xaa-Ser-Arg-Arg-Ala-Gln-Asp-Phe-Val-
Gln-Trp-Leu-Xaa-Xaa-Xaa-R,

(SEQ ID NO: 811)

NH₂-His-Ser-Gln-Gly-Thr-Phe-Thr-Ser-Asp-Tyr-Ser-
Lys-Tyr-Leu-Asp-Ser-Arg-Arg-Ala-Gln-Asp-Phe-Val-
Gln-Trp-Leu-Met-Asp-Thr-R
and

(SEQ ID NO: 813)

NH₂-His-Ser-Gln-Gly-Thr-Phe-Thr-Ser-Asp-Tyr-Ser-
Xaa-Tyr-Leu-Glu-Ser-Arg-Arg-Ala-Gln-Asp-Phe-Val-
Gln-Trp-Leu-Met-Asp-Thr-R

[0374] wherein Xaa at position 15 is Asp, Glu, cysteic acid, homoglutamic acid or homocysteic acid, the Xaa at position 28 is Asn or an acidic amino acid and the Xaa at position 29 is Thr or an acidic amino acid and R is an acidic amino acid, COOH or CONH₂, with the proviso that an acidic acid residue is present at one of positions 28, 29 or 30. In some embodiments R is COOH, and in another embodiment R is CONH₂.

[0375] The present disclosure also encompasses glucagon fusion peptides wherein a second peptide has been fused to the C-terminus of the glucagon peptide to enhance the stability and solubility of the glucagon peptide. More particularly, the fusion glucagon peptide may comprise a glucagon agonist analog comprising a glucagon peptide NH₂—His-Ser-Gln-Gly-Thr-Phe-Thr-Ser-Asp-Tyr-Ser-Lys-Tyr-Leu-Xaa-Ser-Arg-Arg-Ala-Gln-Asp-Phe-Val-Gln-Trp-Leu-Xaa-Xaa-Xaa-R (SEQ ID NO: 834), wherein R is an acidic amino acid or a bond and an amino acid sequence of SEQ ID NO: 820 (GPSSGAPPPS), SEQ ID NO: 821 (KRNRNNIA) or SEQ ID NO: 822 (KRNR) linked to the carboxy terminal amino acid of the glucagon peptide. In some embodiments the glucagon peptide is selected from the group consisting of SEQ ID NO: 833, SEQ ID NO: 807 or SEQ ID NO: 808 further comprising an amino acid sequence of SEQ ID NO: 820 (GPSSGAPPPS), SEQ ID NO: 821 (KRNRNNIA) or SEQ ID NO: 822 (KRNR) linked to the carboxy terminal amino acid of the glucagon peptide. In some embodiments the glucagon fusion peptide comprises SEQ ID NO: 802, SEQ ID NO: 803, SEQ ID NO: 804, SEQ ID NO: 805 and SEQ ID NO: 806 or a glucagon agonist analog thereof, further comprising an amino acid sequence of SEQ ID NO: 820 (GPSSGAPPPS), SEQ ID NO: 821 (KRNRNNIA) or SEQ ID NO: 822 (KRNR) linked to amino acid 29 of the glucagon peptide. In accordance with some embodiments the fusion peptide further comprises a PEG chain linked to an amino acid at position 16, 17, 21, 24, 29, within a C-terminal extension, or at the C-terminal amino acid, wherein the PEG chain is selected from the range of 500 to 40,000 Daltons. In some embodiments the amino acid sequence of SEQ ID NO: 820 (GPSSGAPPPS), SEQ ID NO: 821 (KRNRNNIA) or SEQ ID NO: 822 (KRNR) is bound to amino acid 29 of the glucagon peptide through a peptide bond. In some embodiments the glucagon peptide portion of the glucagon fusion peptide comprises a sequence selected from the group consisting of SEQ ID NO: 810, SEQ ID NO: 811 and SEQ ID NO: 813. In some embodiments the glucagon peptide portion of the glucagon fusion peptide comprises the sequence of SEQ ID NO: 811 or SEQ ID NO: 813, wherein a PEG chain is linked at position 21, 24, 29, within a C-terminal extension or at the C-terminal amino acid, respectively.

[0376] In another embodiment the glucagon peptide sequence of the fusion peptide comprises the sequence of SEQ ID NO: 811, further comprising an amino acid sequence of SEQ ID NO: 820 (GPSSGAPPPS), SEQ ID NO: 821 (KRNRNNIA) or SEQ ID NO: 822 (KRNR) linked to amino acid 29 of the glucagon peptide. In some embodiments the glucagon fusion peptide comprises a sequence selected from the group consisting of SEQ ID NO: 824, SEQ ID NO: 825 and SEQ ID NO: 826. Typically the fusion peptides of the present invention will have a C-terminal amino acid with the standard carboxylic acid group. However, analogs of those sequences wherein the C-terminal amino acid has an amide substituted for the carboxylic acid are also encompassed as embodiments. In accordance with some embodiments the fusion glucagon peptide comprises a glucagon agonist analog selected from the group consisting of SEQ ID NO: 810, SEQ ID NO: 811 and SEQ ID NO: 813, further comprising an amino acid sequence of SEQ ID NO: 823 (GPSSGAPPPS-CONH₂) linked to amino acid 29 of the glucagon peptide.

[0377] The glucagon agonists of the present invention can be further modified to improve the peptide's solubility and stability in aqueous solutions while retaining the biological activity of the glucagon peptide. In accordance with some embodiments, introduction of hydrophilic groups at one or more positions selected from positions 16, 17, 20, 21, 24 and 29 of the peptide of SEQ ID NO: 811, or a glucagon agonist analog thereof, are anticipated to improve the solubility and stability of the pH stabilize glucagon analog. More particularly, in some embodiments the glucagon peptide of SEQ ID NO: 810, SEQ ID NO: 811, SEQ ID NO: 813, or SEQ ID NO: 832 is modified to comprise one or more hydrophilic groups covalently linked to the side chains of amino acids present at positions 21 and 24 of the glucagon peptide.

[0378] In accordance with some embodiments, the glucagon peptide of SEQ ID NO: 811 is modified to contain one or more amino acid substitution at positions 16, 17, 20, 21, 24 and/or 29, wherein the native amino acid is substituted with an amino acid having a side chain suitable for crosslinking with hydrophilic moieties, including for example, PEG. The native peptide can be substituted with a naturally occurring amino acid or a synthetic (non-naturally occurring) amino acid. Synthetic or non-naturally occurring amino acids refer to amino acids that do not naturally occur in vivo but which, nevertheless, can be incorporated into the peptide structures described herein.

[0379] In some embodiments, a glucagon agonist of SEQ ID NO: 810, SEQ ID NO: 811 or SEQ ID NO: 813 is provided wherein the native glucagon peptide sequence has been modified to contain a naturally occurring or synthetic amino acid in at least one of positions 16, 17, 21, 24, 29, within a C-terminal extension or at the C-terminal amino acid of the native sequence, wherein the amino acid substitute further comprises a hydrophilic moiety. In some embodiments the substitution is at position 21 or 24, and in a further embodiment the hydrophilic moiety is a PEG chain. In some embodiments the glucagon peptide of SEQ ID NO: 811 is substituted with at least one cysteine residue, wherein the side chain of the cysteine residue is further modified with a thiol reactive reagent, including for example, maleimido, vinyl sulfone, 2-pyridylthio, haloalkyl, and haloacyl. These thiol reactive reagents may contain carboxy, keto, hydroxyl, and ether groups as well as other hydrophilic moieties such as polyethylene glycol units. In an alternative embodiment, the native glucagon peptide is substituted with lysine, and the side chain of the substituting lysine residue is further modified using amine reactive reagents such as active esters (succinimido, anhydride, etc) of carboxylic acids or aldehydes of hydrophilic moieties such as polyethylene glycol. In some embodiments the glucagon peptide is selected form the group consisting of SEQ ID NO: 814, SEQ ID NO: 815, SEQ ID NO: 816, SEQ ID NO: 817, SEQ ID NO: 818 and SEQ ID NO: 819.

[0380] In accordance with some embodiments the pegylated glucagon peptide comprises two or more polyethylene glycol chains covalently bound to the glucagon peptide wherein the total molecular weight of the glucagon chains is about 1,000 to about 5,000 Daltons. In some embodiments the pegylated glucagon agonist comprises a peptide of SEQ ID NO: 806, wherein a PEG chain is covalently linked to the amino acid residue at position 21 and at position 24, and wherein the combined molecular weight of the two PEG chains is about 1,000 to about 5,000 Daltons. In another embodiment the pegylated glucagon agonist comprises a peptide of SEQ ID NO: 806, wherein a PEG chain is covalently linked to the amino acid residue at position 21 and at position 24, and wherein the combined molecular weight of the two PEG chains is about 5,000 to about 20,000 Daltons.

[0381] The polyethylene glycol chain may be in the form of a straight chain or it may be branched. In accordance with some embodiments the polyethylene glycol chain has an average molecular weight selected from the range of about 500 to about 40,000 Daltons. In some embodiments the polyethylene glycol chain has a molecular weight selected from the range of about 500 to about 5,000 Daltons. In another embodiment the polyethylene glycol chain has a molecular weight of about 20,000 to about 40,000 Daltons.

[0382] Any of the glucagon peptides described above may be further modified to include a covalent or non-covalent intramolecular bridge or an alpha helix-stabilizing amino acid within the C-terminal portion of the glucagon peptide (amino acid positions 12-29). In accordance with some embodiments, the glucagon peptide comprises any one or more of the modifications discussed above in addition to an amino acid substitution at positions 16, 20, 21, or 24 (or a combination thereof) with an α,α-disubstituted amino acid, e.g., AIB. In accordance with another embodiment, the glucagon peptide comprises any one or more modifications discussed above in addition to an intramolecular bridge, e.g., a lactam, between the side chains of the amino acids at positions 16 and 20 of the glucagon peptide.

[0383] In accordance with some embodiments, the glucagon peptide comprises the amino acid sequence of SEQ ID NO: 877, wherein the Xaa at position 3 is an amino acid comprising a side chain of Structure I, II, or III:

[chemical structure]

[0384] wherein R¹ is C₀₋₃ alkyl or C₀₋₃ heteroalkyl; R² is NHR⁴ or C₁₋₃ alkyl; R³ is C₁₋₃ alkyl; R⁴ is H or C₁₋₃ alkyl; X is NH, O, or S; and Y is NHR⁴, SR³, or OR³. In some embodiments, X is NH or Y is NHR⁴. In some embodiments, R¹ is C₀₋₂ alkyl or C₁ heteroalkyl. In some embodiments, R² is NHR⁴ or C₁ alkyl. In some embodiments, R⁴ is H or C¹ alkyl. In exemplary embodiments an amino acid comprising a side chain of Structure I is provided wherein, R¹ is CH₂—S, X is NH, and R² is CH₃ (acetamidomethyl-cysteine, C(Acm)); R¹ is CH₂, X is NH, and R² is CH₃ (acetyldiaminobutanoic acid, Dab(Ac)); R¹ is C₀ alkyl, X is NH, R² is NHR⁴, and R⁴ is H (carbamoyldiaminopropanoic acid, Dap(urea)); or R¹ is CH₂—CH₂, X is NH, and R² is CH₃ (acetylornithine, Orn(Ac)). In exemplary embodiments an amino acid comprising a side chain of Structure II is provided, wherein R¹ is CH₂, Y is NHR⁴, and R⁴ is CH₃ (methylglutamine, Q(Me)); In exemplary embodiments an amino acid comprising a side chain of Structure III is provided wherein, R¹ is CH₂ and R⁴ is H (methionine-sulfoxide, M(O)); In specific embodiments, the amino acid at position 3 is substituted with Dab(Ac). For example, glucagon agonists can comprise the amino acid sequence of SEQ ID NO: 863, SEQ ID NO: 869, SEQ ID NO: 871, SEQ ID NO: 872, SEQ ID NO: 873, and SEQ ID NO: 874.

[0385] In certain embodiments, the glucagon peptide is an analog of the glucagon peptide of SEQ ID NO: 877. In specific aspects, the analog comprises any of the amino acid modifications described herein, including, but not limited to: a substitution of Asn at position 28 with a charged amino acid; a substitution of Asn at position 28 with a charged amino acid selected from the group consisting of Lys, Arg, His, Asp, Glu, cysteic acid, and homocysteic acid; a substitution at position 28 with Asn, Asp, or Glu; a substitution at position 28 with Asp; a substitution at position 28 with Glu; a substitution of Thr at position 29 with a charged amino acid; a substitution of Thr at position 29 with a charged amino acid selected from the group consisting of Lys, Arg, His, Asp, Glu, cysteic acid, and homocysteic acid; a substitution at position 29 with Asp, Glu, or Lys; a substitution at position 29 with Glu; a insertion of 1-3 charged amino acids after position 29; an insertion after position 29 of Glu or Lys; an insertion after position 29 of Gly-Lys or Lys-Lys; and a combination thereof.

[0386] In certain embodiments, the analog of the glucagon peptide of SEQ ID NO: 877 comprises an α,α-disubstituted amino acid, such as AIB, at one, two, three, or all of positions 16, 20, 21, and 24.

[0387] In certain embodiments, the analog of the glucagon peptide of SEQ ID NO: 877 comprises one or more of the following: substitution of His at position 1 with a non-native amino acid that reduces susceptibility of the glucagon peptide to cleavage by dipeptidyl peptidase IV (DPP-IV), substitution of Ser at position 2 with a non-native amino acid that reduces susceptibility of the glucagon peptide to cleavage by dipeptidyl peptidase IV (DPP-IV), substitution of Thr at position 7 with an amino acid lacking a hydroxyl group, e.g., Abu or Ile; substitution of Tyr at position 10 with Phe or Val; substitution of Lys at position 12 with Arg; substitution of Asp at position 15 with Glu, substitution of Ser at position 16 with Thr or AIB; substitution of Gln at position 20 with Ala or AIB; substitution of Asp at position 21 with Glu; substitution of Gln at position 24 with Ala or AIB; substitution of Met at position 27 with Leu or Nle; deletion of amino acids at positions 27-29; deletion of amino acids at positions 28-29; deletion of the amino acid at positions 29; addition of the amino acid sequence of SEQ ID NO: 820 to the C-terminus, wherein the amino acid at position 29 is Thr or Gly, or a combination thereof.

[0388] In accordance with specific embodiments, the glucagon peptide comprises the amino acid sequence of any of SEQ ID NOs: 862-867 and 869-874.

[0389] In certain embodiments, the analog of the glucagon peptide comprising SEQ ID NO: 877 comprises a hydrophilic moiety, e.g., PEG, covalently linked to the amino acid at any of positions 16, 17, 20, 21, 24, and 29 or at the C-terminal amino acid.

[0390] In certain embodiments, the analog of the glucagon peptide comprising SEQ

[0391] ID NO: 877 comprises an amino acid comprising a side chain covalently attached, optionally, through a spacer, to an acyl group or an alkyl group, which acyl group or alkyl group is non-native to a naturally-occurring amino acid. The acyl group in some embodiments is a C4 to C30 fatty acyl group. In other embodiments, the alkyl group is a C4 to C30 alkyl. In specific aspects, the acyl group or alkyl group is covalently attached to the side chain of the amino acid at position 10. In some embodiments, the amino acid at position 7 is Ile or Abu.

[0392] The glucagon agonist may be a peptide comprising the amino acid sequence of any of the SEQ ID NOs: 801-919, optionally with up to 1, 2, 3, 4, or 5 further modifications that retain glucagon agonist activity. In certain embodiments, the glucagon agonist comprises the amino acids of any of SEQ ID NOs: 859-919.

### Class 2 Glucagon Related Peptides

[0393] In certain embodiments, the glucagon related peptide is a Class 2 glucagon related peptide, which is described herein and in International Patent Application No. PCT US2009/47447 (filed on Jun. 16, 2009),U.S. Provisional Application No. 61/090,448, and U.S. Application No. 61/151,349, the contents of which are incorporated by reference in their entirety, as well as in International Patent Application No. PCT/US10/38825 filed 16 Jun. 2010 and in U.S. Provisional Application No. 61/187,578, the contents of which are incorporated by reference in their entirety. Class 2 glucagon related peptides include peptides within Class 6 glucagon related peptides, and thus all references herein to analogs, derivatives, conjugates, modifications and the like with respect to Class 2 glucagon related peptides apply also to Class 6 glucagon related peptides.

[0394] The biological sequences referenced in the following section (SEQ ID NOs: 1001-1262) relating to Class 2 glucagon related peptides correspond to SEQ ID NOs: 1-262 in International Patent Application No. PCT US2009/47447.

[0395] Activity

[0396] Native glucagon does not activate the GIP receptor, and normally has about 1% of the activity of native-GLP-1 at the GLP-1 receptor. Modifications to the native glucagon sequence described herein produce Class 2 glucagon related peptides that can exhibit potent glucagon activity equivalent to or better than the activity of native glucagon (SEQ ID NO: 1001), potent GIP activity equivalent to or better than the activity of native GIP (SEQ ID NO: 1004), and/or potent GLP-1 activity equivalent to or better than the activity of native GLP-1. In this regard, the Class 2 glucagon related peptide may be one of a glucagon/GIP co-agonist, glucagon/GIP/GLP-1 tri-agonist, GIP/GLP-1 co-agonist, or a GIP agonist glucagon peptide, as further described herein.

[0397] In some embodiments, the Class 2 glucagon related peptides described herein exhibit an EC50 for GIP receptor activation activity of about 100 nM or less, or about 75, 50, 25, 10, 8, 6, 5, 4, 3, 2 or 1 nM or less. In some embodiments, the Class 2 glucagon related peptides exhibit an EC50 for glucagon receptor activation of about 100 nM or less, or about 75, 50, 25, 10, 8, 6, 5, 4, 3, 2 or 1 nM or less. In some embodiments, the Class 2 glucagon related peptides exhibit an EC50 for GLP-1 receptor activation of about 100 nM or less, or about 75, 50, 25, 10, 8, 6, 5, 4, 3, 2 or 1 nM or less. Receptor activation can be measured by in vitro assays measuring cAMP induction in HEK293 cells over-expressing the receptor, e.g. assaying HEK293 cells co-transfected with DNA encoding the receptor and a luciferase gene linked to cAMP responsive element as described in the examples.

[0398] In some embodiments, Class 2 glucagon related peptides exhibit at least about 0.1%, 0.2%, 0.3%, 0.4%, 0.5%, 0.6%, 0.7%, 0.8%, 0.9%, 1%, 5%, 10%, 20%, 30%, 40%, 50%, 60%, 75%, 100%, 125%, 150%, 175% or 200% or higher activity at the GIP receptor relative to native GIP (GIP potency). In some embodiments, the glucagon peptides described herein exhibit no more than 1000%, 10,000%, 100,000%, or 1,000,000% activity at the GIP receptor relative to native GIP. In some embodiments, Class 2 glucagon related peptides exhibit at least about 1%, 5%, 10%, 20%, 30%, 40%, 50%, 60%, 75%, 100%, 125%, 150%, 175%, 200%, 250%, 300%, 350%, 400%, 450%, or 500% or higher activity at the glucagon receptor relative to native glucagon (glucagon potency). In some embodiments, the glucagon peptides described herein exhibit no more than 1000%, 10,000%, 100,000%, or 1,000,000% activity at the glucagon receptor relative to native glucagon. In some embodiments, Class 2 glucagon related peptides exhibit at least about 0.1%, 0.2%, 0.3%, 0.4%, 0.5%, 0.6%, 0.7%, 0.8%, 0.9%, 1%, 5%, 10%, 20%, 30%, 40%, 50%, 60%, 75%, 100%, 125%, 150%, 175% or 200% or higher activity at the GLP-1 receptor relative to native GLP-1 (GLP-1 potency). In some embodiments, the glucagon peptides described herein exhibit no more than 1000%, 10,000%, 100,000%, or 1,000,000% activity at the GLP-1 receptor relative to native GLP-1. A Class 2 glucagon related peptide's activity at a receptor relative to a native ligand of the receptor is calculated as the inverse ratio of EC50s for the Class 2 glucagon related peptide vs. the native ligand.

[0399] In some embodiments, Class 2 glucagon related peptides exhibit activity at both the glucagon receptor and the GIP receptor (“glucagon/GIP co-agonists”). These Class 2 glucagon related peptides have lost native glucagon's selectivity for glucagon receptor compared to GIP receptor. In some embodiments, the EC50 of the Class 2 glucagon related peptide at the GIP receptor is less than about 50-fold, 40-fold, 30-fold or 20-fold different (higher or lower) from its EC50 at the glucagon receptor. In some embodiments, the GIP potency of the Class 2 glucagon related peptide is less than about 500-, 450-, 400-, 350-, 300-, 250-, 200-, 150-, 100-, 75-, 50-, 25-, 20-, 15-, 10-, or 5-fold different (higher or lower) from its glucagon potency. In some embodiments, the ratio of the EC50 of the Class 2 glucagon related peptide at the GIP receptor divided by the EC50 of the Class 2 glucagon related peptide at the glucagon receptor is less than about 100, 75, 60, 50, 40, 30, 20, 15, 10, or 5. In some embodiments, the ratio of the EC50 at the GIP receptor divided by the EC50 at the glucagon receptor is about 1 or less than about 1 (e.g., about 0.01, 0.013, 0.0167, 0.02, 0.025, 0.03, 0.05, 0.067, 0.1, 0.2). In some embodiments, the ratio of the GIP potency of the Class 2 glucagon related peptide compared to the glucagon potency of the Class 2 glucagon related peptide is less than about 500, 450, 400, 350, 300, 250, 200, 150, 100, 75, 60, 50, 40, 30, 20, 15, 10, or 5. In some embodiments, the ratio of the potency at the GIP receptor divided by the potency at the glucagon receptor is about 1 or less than about 1 (e.g., about 0.01, 0.013, 0.0167, 0.02, 0.025, 0.03, 0.05, 0.067, 0.1, 0.2). In some embodiments, GLP-1 activity have been significantly reduced or destroyed, e.g., by an amino acid modification at position 7, a deletion of the amino acid(s)C-terminal to the amino acid at position 27 or 28, yielding a 27- or 28-amino acid peptide, or a combination thereof.

[0400] In another aspect, Class 2 glucagon related peptides exhibit activity at the glucagon, GIP and GLP-1 receptors (“glucagon/GIP/GLP-1 tri-agonists”). These Class 2 glucagon related peptides have lost native glucagon's selectivity for the glucagon receptor compared to both the GLP-1 and GIP receptors. In some embodiments, the EC50 of the Class 2 glucagon related peptide at the GIP receptor is less than about 50-fold, 40-fold, 30-fold or 20-fold different (higher or lower) from its respective EC50s at the glucagon and GLP-1 receptors. In some embodiments, the GIP potency of the Class 2 glucagon related peptide is less than about 500-, 450-, 400-, 350-, 300-, 250-, 200-, 150-, 100-, 75-, 50-, 25-, 20-, 15-, 10-, or 5-fold different (higher or lower) from its glucagon and GLP-1 potencies. In some embodiments, the ratio of the EC50 of the tri-agonist at the GIP receptor divided by the EC50 of the tri-agonist at the GLP-1 receptor is less than about 100, 75, 60, 50, 40, 30, 20, 15, 10, or 5. In some embodiments, the ratio of the EC50 at the GIP receptor divided by the EC50 at the GLP-1 receptor is about 1 or less than about 1 (e.g., about 0.01, 0.013, 0.0167, 0.02, 0.025, 0.03, 0.05, 0.067, 0.1, 0.2). In some embodiments, the ratio of the GIP potency of the tri-agonist compared to the GLP-1 potency of the tri-agonist is less than about 100, 75, 60, 50, 40, 30, 20, 15, 10, or 5. In some embodiments, the ratio of the potency at the GIP receptor divided by the potency at the GLP-1 receptor is about 1 or less than about 1 (e.g., about 0.01, 0.013, 0.0167, 0.02, 0.025, 0.03, 0.05, 0.067, 0.1, 0.2). In related embodiments, the ratio of the EC50 of the tri-agonist at the GIP receptor divided by the EC50 of the tri-agonist at the glucagon receptor is less than about 100, 75, 60, 50, 40, 30, 20, 15, 10, or 5. In some embodiments, the ratio of the EC50 at the GIP receptor divided by the EC50 at the glucagon receptor is about 1 or less than about 1 (e.g., about 0.01, 0.013, 0.0167, 0.02, 0.025, 0.03, 0.05, 0.067, 0.1, 0.2). In some embodiments, the ratio of the GIP potency of the tri-agonist compared to the glucagon potency of the tri-agonist is less than about 500, 450, 400, 350, 300, 250, 200, 150, 100, 75, 60, 50, 40, 30, 20, 15, 10, or 5. In some embodiments, the ratio of the potency at the GIP receptor divided by the potency at the glucagon receptor is about 1 or less than about 1 (e.g., about 0.01, 0.013, 0.0167, 0.02, 0.025, 0.03, 0.05, 0.067, 0.1, 0.2). In some embodiments, the ratio of the EC50 of the tri-agonist at the GLP-1 receptor divided by the EC50 of the tri-agonist at the glucagon receptor is less than about 100, 75, 60, 50, 40, 30, 20, 15, 10, or 5. In some embodiments, the ratio of the EC50 at the GLP-1 receptor divided by the EC50 at the glucagon receptor is about 1 or less than about 1 (e.g., about 0.01, 0.013, 0.0167, 0.02, 0.025, 0.03, 0.05, 0.067, 0.1, 0.2). In some embodiments, the ratio of the GLP-1 potency of the tri-agonist compared to the glucagon potency of the tri-agonist is less than about 100, 75, 60, 50, 40, 30, 20, 15, 10, or 5. In some embodiments, the ratio of the potency at the GLP-1 receptor divided by the potency at the glucagon receptor is about 1 or less than about 1 (e.g., about 0.01, 0.013, 0.0167, 0.02, 0.025, 0.03, 0.05, 0.067, 0.1, 0.2).

[0401] In yet another aspect, Class 2 glucagon related peptides exhibit activity at the GLP-1 and GIP receptors, but in which the glucagon activity has been significantly reduced or destroyed (“GIP/GLP-1 co-agonists”), e.g., by an amino acid modification at position 3. For example, substitution at this position with an acidic, basic, or a hydrophobic amino acid (glutamic acid, ornithine, norleucine) reduces glucagon activity. In some embodiments, the EC50 of the glucagon peptide at the GIP receptor is less than about 50-fold, 40-fold, 30-fold or 20-fold different (higher or lower) from its EC50 at the GLP-1 receptor. In some embodiments, the GIP potency of the Class 2 glucagon related peptide is less than about 25-, 20-, 15-, 10-, or 5-fold different (higher or lower) from its GLP-1 potency. In some embodiments these Class 2 glucagon related peptides have about 10% or less of the activity of native glucagon at the glucagon receptor, e.g. about 1-10%, or about 0.1-10%, or greater than about 0.1% but less than about 10%. In some embodiments, the ratio of the EC50 of the Class 2 glucagon related peptide at the GIP receptor divided by the EC50 of the Class 2 glucagon related peptide at the GLP-1 receptor is less than about 100, 75, 60, 50, 40, 30, 20, 15, 10, or 5, and no less than 1. In some embodiments, the ratio of the GIP potency of the Class 2 glucagon related peptide compared to the GLP-1 potency of the Class 2 glucagon related peptide is less than about 100, 75, 60, 50, 40, 30, 20, 15, 10, or 5, and no less than 1.

[0402] In a further aspect, Class 2 glucagon related peptides exhibit activity at the GIP receptor, in which the glucagon and GLP-1 activity have been significantly reduced or destroyed (“GIP agonist glucagon peptides”), e.g., by amino acid modifications at positions 3 with Glu and 7 with Ile. In some embodiments, these Class 2 glucagon related peptides have about 10% or less of the activity of native glucagon at the glucagon receptor, e.g. about 1-10%, or about 0.1-10%, or greater than about 0.1%, 0.5%, or 1% but less than about 1%, 5%, or 10%. In some embodiments these Class 2 glucagon related peptides also have about 10% or less of the activity of native GLP-1 at the GLP-1 receptor, e.g. about 1-10%, or about 0.1-10%, or greater than about 0.1%, 0.5%, or 1% but less than about 1%, 5%, or 10%.

[0403] In some embodiments, when the Class 2 glucagon related peptide is not pegylated, the EC50 of the Class 2 glucagon related peptide for GIP receptor activation is about 4, 2, 1 nM or less, or the analog has at least about 1%, 2%, 3%, 4% or 5% of the activity of native GIP at the GIP receptor. In related embodiments, the EC50 of the unpegylated Class 2 glucagon related peptide for GLP-1 receptor activation is about 4, 2, 1 nM or less or has at least about 1%, 2%, 3%, 4% or 5% of the activity of native GLP-1 at the GLP-1 receptor. In yet other related embodiments, the EC50 of the unpegylated Class 2 glucagon related peptide for glucagon receptor activation is about 4, 2, 1 nM or less, or at least about 5%, 10%, 15% or 20% of the activity of native glucagon at the glucagon receptor. In some embodiments, the unpegylated Class 2 glucagon related peptide has less than about 1% of the activity of native glucagon at the glucagon receptor. In other embodiments, the unpegylated Class 2 glucagon related peptide has less than about 10%, 5% or 1% of the activity of native GLP-1 at the GLP-1 receptor.

[0404] In embodiments where the Class 2 glucagon related peptides are linked to hydrophilic moieties such as PEG, the relative EC50s at one or more receptors may be higher e.g., about 10-fold higher. For example, the EC50 of a pegylated analog for GIP receptor activation is about 10 nM or less, or the Class 2 glucagon related peptide has at least about 0.1%, 0.2%, 0.3%, 0.4% or 0.5% of the activity of native GIP at the GIP receptor. In related embodiments, the EC50 of a pegylated Class 2 glucagon related peptide for GLP-1 receptor activation is about 10 nM or less or has at least about 0.1%, 0.2%, 0.3%, 0.4% or 0.5% of the activity of native GLP-1 at the GLP-1 receptor. In yet other related embodiments, the EC50 of a pegylated Class 2 glucagon related peptide for glucagon receptor activation is about 10 nM or less, or at least about 0.5%, 1%, 1.5% or 2% of the activity of native glucagon at the glucagon receptor. In some embodiments, the Class 2 glucagon related peptide has less than about 1% of the activity of native glucagon at the glucagon receptor. In other embodiments, the Class 2 glucagon related peptide has less than about 10%, 5% or 1% of the activity of native GLP-1 at the GLP-1 receptor.

[0405] Modifications

[0406] The modifications disclosed herein in reference to a Class 2 glucagon related peptide permit the manipulation of glucagon (SEQ ID NO: 1001) to create glucagon peptides that exhibit increased GIP activity, glucagon activity, and/or GLP-1 activity. Other modifications disclosed herein in reference to a Class 2 glucagon related peptide prolong the half-life, increase solubility, or increase stability of the resulting peptide. Yet other modifications disclosed herein in reference to a Class 2 glucagon related peptide have no effect on activity, or can be made without destroying the desired activity or activities. Any of the combinations in reference to a Class 2 glucagon related peptide that serve the same purpose (e.g. increasing GIP activity) can be applied individually or in combination. Any of the single or sets of combinations in reference to a Class 2 glucagon related peptide that confer enhanced properties can be applied individually or in combination, e.g. increased GIP and/or GLP-1 activity can be combined with increased half-life. In related embodiments, 1, 2, 3, 4, 5, 6 or more of the amino acid modifications may be non-conservative substitutions, additions or deletions. In some embodiments, 1, 2, 3, 4, 5, 6 or more of the amino acid modifications may be conservative substitutions.

[0407] Modifications that Affect GIP Activity

[0408] Enhanced activity at the GIP receptor is provided by an amino acid modification at position 1. For example, His at position 1 is substituted with a large, aromatic amino acid, optionally Tyr, Phe, Trp, amino-Phe, nitro-Phe, chloro-Phe, sulfo-Phe, 4-pyridyl-Ala, methyl-Tyr, or 3-amino Tyr. The combination of Tyr at position 1 with stabilization of the alpha helix within the region corresponding to amino acids 12-29 provided a Class 2 glucagon related peptide that activates the GIP receptor as well as the GLP-1 receptor and the glucagon receptor. The alpha helix structure can be stabilized by, e.g., formation of a covalent or non-covalent intramolecular bridge, or substitution and/or insertion of amino acids around positions 12-29 with an alpha helix-stabilizing amino acid (e.g., an α,α-disubstituted amino acid).

[0409] Enhanced activity at the GIP receptor is also provided by amino acid modifications at positions 27 and/or 28, and optionally at position 29. For example, the Met at position 27 is substituted with a large aliphatic amino acid, optionally Leu, the Asn at position 28 is substituted with a small aliphatic amino acid, optionally Ala, and the Thr at position 29 is substituted with a small aliphatic amino acid, optionally Gly. Substitution with LAG at positions 27-29 provides increased GIP activity relative to the native MNT sequence at those positions.

[0410] Enhanced activity at the GIP receptor is also provided by an amino acid modification at position 12. For example, position 12 is substituted with a large, aliphatic, nonpolar amino acid, optionally Ile.

[0411] Enhanced activity at the GIP receptor is also provided by an amino acid modification at positions 17 and/or 18. For example, position 17 is substituted with a polar residue, optionally Gln, and position 18 is substituted with a small aliphatic amino acid, optionally Ala. A substitution with QA at positions 17 and 18 provides increased GIP activity relative to the native RR sequence at those positions.

[0412] Increased activity at the GIP receptor is provided by modifications that permit formation of an intramolecular bridge between amino acid side chains at positions from 12 to 29. For example, an intramolecular bridge can be formed by a covalent bond between the side chains of two amino acids at positions i and i+4 or between positions j and j+3, or between positions k and k+7. In exemplary embodiments, the bridge is between positions 12 and 16, 16 and 20, 20 and 24, 24 and 28, or 17 and 20. In other embodiments, non-covalent interactions such as salt bridges can be formed between positively and negatively charged amino acids at these positions.

[0413] Any of the modifications described above which increase GIP receptor activity can be applied individually or in combination. Combinations of the modifications that increase GIP receptor activity generally provide higher GIP activity than any of such modifications taken alone.

[0414] Modifications that Affect Glucagon Activity

[0415] In some embodiments, enhanced glucagon potency is provided by an amino acid modification at position 16 of native glucagon (SEQ ID NO: 1001). By way of nonlimiting example, such enhanced potency can be provided by substituting the naturally occurring serine at position 16 with glutamic acid or with another negatively charged amino acid having a side chain with a length of 4 atoms, or alternatively with any one of glutamine, homoglutamic acid, or homocysteic acid, or a charged amino acid having a side chain containing at least one heteroatom, (e.g. N, O, S, P) and with a side chain length of about 4 (or 3-5) atoms. In some embodiments the glucagon peptide retains its original selectivity for the glucagon receptor relative to the GLP-1 receptors.

[0416] Glucagon receptor activity can be reduced by an amino acid modification at position 3, e.g. substitution of the naturally occurring glutamine at position 3, with an acidic, basic, or a hydrophobic amino acid. For example substitution at position 3 with glutamic acid, ornithine, or norleucine substantially reduces or destroys glucagon receptor activity.

[0417] Maintained or enhanced activity at the glucagon receptor may be achieved by modifying the Gln at position 3 with a glutamine analog, as described herein. For example, glucagon agonists can comprise the amino acid sequence of any of SEQ ID NOs: 1243-1248, 1250, 1251, and 1253-1256.

[0418] Restoration of glucagon activity which has been reduced by amino acid modifications at positions 1 and 2 is provided by modifications that that stabilize the alpha helix structure of the C-terminal portion (amino acids 12-29) of the glucagon peptide or analog thereof. For example, an intramolecular bridge can be formed by a covalent bond between the side chains of two amino acids at positions i and i+4 or between positions j and j+3, or between positions k and k+7. In other embodiments, non-covalent interactions such as salt bridges can be formed between positively and negatively charged amino acids at these positions. In yet other embodiments, one or more α, α-disubstituted amino acids are inserted or substituted into this C-terminal portion (amino acids 12-29) at positions that retain the desired activity. For example, one, two, three or all of positions 16, 20, 21 or 24 are substituted with an α, α-disubstituted amino acid, e.g., AIB.

[0419] Modifications that Affect GLP-1 Activity

[0420] Enhanced activity at the GLP-1 receptor is provided by replacing the carboxylic acid of the C-terminal amino acid with a charge-neutral group, such as an amide or ester.

[0421] Enhanced activity at the GLP-1 receptor is also provided by stabilizing the alpha-helix structure in the C-terminal portion of glucagon (around amino acids 12-29), e.g., through formation of an intramolecular bridge between the side chains of two amino acids, or substitution and/or insertion of amino acids around positions 12-29 with an alpha helix-stabilizing amino acid (e.g., an α,α-disubstituted amino acid), as further described herein. In exemplary embodiments, the side chains of the amino acid pairs 12 and 16, 13 and 17, 16 and 20, 17 and 21, 20 and 24 or 24 and 28 (amino acid pairs in which i=12, 16, 20, or 24) are linked to one another and thus stabilize the glucagon alpha helix. In some embodiments, the bridge or linker is about 8 (or about 7-9) atoms in length, particularly when the bridge is between positions i and i+4. In some embodiments, the bridge or linker is about 6 (or about 5-7) atoms in length, particularly when the bridge is between positions j and j+3.

[0422] In some embodiments, intramolecular bridges are formed by (a) substituting the naturally occurring serine at position 16 with glutamic acid or with another negatively charged amino acid having a side chain with a length of 4 atoms, or alternatively with any one of glutamine, homoglutamic acid, or homocysteic acid, or a charged amino acid having a side chain containing at least one heteroatom, (e.g. N, O, S, P) and with a side chain length of about 4 (or 3-5) atoms, and (b) substituting the naturally occurring glutamine at position 20 with another hydrophilic amino acid having a side chain that is either charged or has an ability to hydrogen-bond, and is at least about 5 (or about 4-6) atoms in length, for example, lysine, citrulline, arginine, or ornithine. The side chains of such amino acids at positions 16 and 20 can form a salt bridge or can be covalently linked. In some embodiments the two amino acids are bound to one another to form a lactam ring.

[0423] In some embodiments, stabilization of the alpha helix structure in the C-terminal portion of the glucagon peptide is achieved through the formation of an intramolecular bridge other than a lactam bridge. For example, suitable covalent bonding methods include any one or more of olefin metathesis, lanthionine-based cyclization, disulfide bridge or modified sulfur-containing bridge formation, the use of α, ω-diaminoalkane tethers, the formation of metal-atom bridges, and other means of peptide cyclization are used to stabilize the alpha helix.

[0424] In yet other embodiments, one or more α, α-disubstituted amino acids are inserted or substituted into this C-terminal portion (amino acids 12-29) at positions that retain the desired activity. For example, one, two, three or all of positions 16, 20, 21 or 24 are substituted with an α, α-disubstituted amino acid, e.g., AIB.

[0425] Increased activity at the GLP-1 receptor is provided by an amino acid modification at position 20 as described herein.

[0426] Increased activity at the GLP-1 receptor is provided by adding GPSSGAPPPS (SEQ ID NO: 1095) or XGPSSGAPPPS (SEQ ID NO: 1096) to the C-terminus. GLP-1 activity in such analogs can be further increased by modifying the amino acid at position 18, 28 or 29, or at position 18 and 29, as described herein.

[0427] A further modest increase in GLP-1 potency is provided by modifying the amino acid at position 10 to be a large, aromatic amino acid residue, optionally Trp.

[0428] Reduced activity at the GLP-1 receptor is provided, e.g., by an amino acid modification at position 7 as described herein.

[0429] Potency at the GLP-1 receptor can be further enhanced by an alanine substitution for the native arginine at position 18.

[0430] Any of the modifications described above in reference to a Class 2 glucagon related peptide which increase GLP-1 receptor activity can be applied individually or in combination. Combinations of the modifications that increase GLP-1 receptor activity generally provide higher GLP-1 activity than any of such modifications taken alone. For example, the invention provides glucagon peptides that comprise modifications at position 16, at position 20, and at the C-terminal carboxylic acid group, optionally with a covalent bond between the amino acids at positions 16 and 20; glucagon peptides that comprise modifications at position 16 and at the C-terminal carboxylic acid group; glucagon peptides that comprise modifications at positions 16 and 20, optionally with a covalent bond between the amino acids at positions 16 and 20; and glucagon peptides that comprise modifications at position 20 and at the C-terminal carboxylic acid group.

[0431] Modifications that Improve DPP-IV Resistance

[0432] Modifications at position 1 and/or 2 can increase the peptide's resistance to dipeptidyl peptidase IV (DPP IV) cleavage. For example, position 1 and/or position 2 may be substituted with a DPP-IV resistant amino acid as described herein. In some embodiments, the amino acid at position 2 is substituted with N-methyl alanine.

[0433] It was observed that modifications at position 2 (e.g. AIB at position 2) and in some cases modifications at position 1 (e.g., DMIA at position 1) may reduce glucagon activity, sometimes significantly; surprisingly, this reduction in glucagon activity can be restored by stabilizing the alpha-helix structure in the C-terminal portion of glucagon (around amino acids 12-29), e.g., through formation of a covalent bond between the side chains of two amino acids, as described herein. In some embodiments, the covalent bond is between amino acids at positions “i” and “i+4”, or positions “j” and “j+3”, e.g., between positions 12 and 16, 16 and 20, 20 and 24, 24 and 28, or 17 and 20. In exemplary embodiments, this covalent bond is a lactam bridge between a glutamic acid at position 16 and a lysine at position 20. In some embodiments, this covalent bond is an intramolecular bridge other than a lactam bridge, as described herein.

[0434] Modifications that Reduce Degradation

[0435] In yet further exemplary embodiments, any of the Class 2 glucagon related peptides can be further modified to improve stability by modifying the amino acid at position 15 and/or 16 of SEQ ID NO: 1001 to reduce degradation of the peptide over time, especially in acidic or alkaline buffers. Such modifications reduce cleavage of the Asp15-Ser16 peptide bond. In exemplary embodiments, the amino acid modification at position 15 is a deletion or substitution of Asp with glutamic acid, homoglutamic acid, cysteic acid or homocysteic acid. In other exemplary embodiments, the amino acid modification at position 16 is a deletion or substitution of Ser with Thr or AIB. In other exemplary embodiments, Ser at position 16 is substituted with glutamic acid or with another negatively charged amino acid having a side chain with a length of 4 atoms, or alternatively with any one of glutamine, homoglutamic acid, or homocysteic acid.

[0436] In some embodiments, the methionine residue present at position 27 of the native peptide is modified, e.g. by deletion or substitution. Such modifications may prevent oxidative degradation of the peptide. In some embodiments, the Met at position 27 is substituted with leucine, isoleucine or norleucine. In some specific embodiments, Met at position 27 is substituted with leucine or norleucine.

[0437] In some embodiments, the Gln at position 20 and/or 24 is modified, e.g. by deletion or substitution. Such modifications can reduce degradation that occurs through deamidation of Gln. In some embodiments, the Gln at position 20 and/or 24 is substituted with Ser, Thr, Ala or AIB. In some embodiments the Gln at position 20 and/or 24 is substituted with Lys, Arg, Orn, or Citrulline.

[0438] In some embodiments, the Asp at position 21 is modified, e.g. by deletion or substitution. Such modifications can reduce degradation that occurs through dehydration of Asp to form a cyclic succinimide intermediate followed by isomerization to iso-aspartate. In some embodiments, position 21 is substituted with Glu, homoglutamic acid or homocysteic acid. In some specific embodiments, position 21 is substituted with Glu.

[0439] Stabilization of the Alpha Helix Structure

[0440] Stabilization of the alpha-helix structure in the C-terminal portion of the Class 2 glucagon related peptide (around amino acids 12-29) provides enhanced GLP-1 and/or GIP activity and restores glucagon activity which has been reduced by amino acid modifications at positions 1 and/or 2. The alpha helix structure can be stabilized by, e.g., formation of a covalent or non-covalent intramolecular bridge, or substitution and/or insertion of amino acids around positions 12-29 with an alpha helix-stabilizing amino acid (e.g., an α,α-disubstituted amino acid). Stabilization of the alpha-helix structure of a GIP agonist may be accomplished as described herein.

[0441] Acylation and Alkylation

[0442] In accordance with some embodiments, the glucagon peptides disclosed herein are modified to comprise an acyl group or alkyl group, e.g., an acyl or alkyl group which is non-native to a naturally-occurring amino acid as described herein. Acylation or alkylation can increase the half-life of the glucagon peptides in circulation. Acylation or alkylation can advantageously delay the onset of action and/or extend the duration of action at the glucagon and/or GLP-1 receptors and/or improve resistance to proteases such as DPP-IV and/or improve solubility. Activity at the glucagon and/or GLP-1 and/or GIP receptors of the glucagon peptide may be maintained after acylation. In some embodiments, the potency of the acylated glucagon peptides is comparable to the unacylated versions of the glucagon peptides. Class 2 glucagon related peptides may be acylated or alkylated at the same amino acid position where a hydrophilic moiety is linked, or at a different amino acid position, as described herein.

[0443] In some embodiments, the invention provides a glucagon peptide modified to comprise an acyl group or alkyl group covalently linked to the amino acid at position 10 of the glucagon peptide. The glucagon peptide may further comprise a spacer between the amino acid at position 10 of the glucagon peptide and the acyl group or alkyl group. In some embodiments, the acyl group is a fatty acid or bile acid, or salt thereof, e.g. a C4 to C30 fatty acid, a C8 to C24 fatty acid, cholic acid, a C4 to C30 alkyl, a C8 to C24 alkyl, or an alkyl comprising a steroid moiety of a bile acid. The spacer is any moiety with suitable reactive groups for attaching acyl or alkyl groups. In exemplary embodiments, the spacer comprises an amino acid, a dipeptide, a tripeptide, a hydrophilic bifunctional, or a hydrophobic bifunctional spacer. In some embodiments, the spacer is selected from the group consisting of: Trp, Glu, Asp, Cys and a spacer comprising NH₂(CH₂CH₂O)n(CH₂)mCOOH, wherein m is any integer from 1 to 6 and n is any integer from 2 to 12. Such acylated or alkylated glucagon peptides may also further comprise a hydrophilic moiety, optionally a polyethylene glycol. Any of the foregoing glucagon peptides may comprise two acyl groups or two alkyl groups, or a combination thereof.

[0444] Conjugates and Fusions

[0445] The GIP agonist can be linked, optionally via covalent bonding and optionally via a linker, to a conjugate moiety as described herein.

[0446] In other embodiments, the second peptide is XGPSSGAPPPS (SEQ ID NO: 1096), wherein X is selected from one of the 20 common amino acids, e.g., glutamic acid, aspartic acid or glycine. In some embodiments X represents an amino acid, for example Cys, that further comprises a hydrophilic moiety covalently linked to the side chain of that amino acid. Such C-terminal extensions improve solubility and also can improve GIP or GLP-1 activity. In some embodiments wherein the glucagon peptide further comprises a carboxy terminal extension, the carboxy terminal amino acid of the extension ends in an amide group or an ester group rather than a carboxylic acid.

[0447] In some embodiments, e.g., in glucagon peptides which comprise the C-terminal extension, the threonine at position 29 of the native glucagon peptide is replaced with a glycine. For example, a glucagon peptide having a glycine substitution for threonine at position 29 and comprising the C-terminal extension of GPSSGAPPPS (SEQ ID NO: 1095) is four times as potent at the GLP-1 receptor as native glucagon modified to comprise the same C-terminal extension. This T29G substitution can be used in conjunction with other modifications disclosed herein to enhance the affinity of the glucagon peptides for the GLP-1 receptor. For example, the T29G substitution can be combined with the S16E and N20K amino acid substitutions, optionally with a lactam bridge between amino acids 16 and 20, and optionally with addition of a PEG chain as described herein.

[0448] In some embodiments an amino acid is added to the C-terminus, and the additional amino acid is selected from the group consisting of glutamic acid, aspartic acid and glycine.

[0449] Modifications that Enhance Solubility

[0450] In another embodiment, the solubility of any of the glucagon peptides can be improved by amino acid substitutions and/or additions that introduce a charged amino acid into the C-terminal portion of the peptide, preferably at a position C-terminal to position 27 of SEQ ID NO: 1001. Optionally, one, two or three charged amino acids may be introduced within the C-terminal portion, preferably C-terminal to position 27. In some embodiments the native amino acid(s) at positions 28 and/or 29 are substituted with one or two charged amino acids, and/or in a further embodiment one to three charged amino acids are also added to the C-terminus of the peptide. In exemplary embodiments, one, two or all of the charged amino acids are negatively charged. In some embodiments, the negatively charged (acidic amino acid) is aspartic acid or glutamic acid.

[0451] Additional modifications, e.g. conservative substitutions, may be made to the glucagon peptide that still allow it to retain GIP activity (and optionally GLP-1 activity and/or glucagon activity).

[0452] Other Modifications

[0453] Any of the modifications described above in reference to a Class 2 peptide which increase or decrease GIP activity, which increase or decrease glucagon receptor activity, and which increase GLP-1 receptor activity can be applied individually or in combination. Any of the modifications described above in reference to a Class 2 glucagon related peptide can also be combined with other modifications that confer other desirable properties, such as increased solubility and/or stability and/or duration of action, as described herein with regard to Class 2 glucagon related peptides. Alternatively, any of the modifications described above in reference to Class 2 glucaton related peptides can be combined with other modifications described herein in reference to Class 2 glucagon related peptides that do not substantially affect solubility or stability or activity. Exemplary modifications include but are not limited to:

[0454] (A) Improving solubility, for example, by introducing one, two, three or more charged amino acid(s) to the C-terminal portion of native glucagon, preferably at a position C-terminal to position 27. Such a charged amino acid can be introduced by substituting a native amino acid with a charged amino acid, e.g. at positions 28 or 29, or alternatively by adding a charged amino acid, e.g. after position 27, 28 or 29. In exemplary embodiments, one, two, three or all of the charged amino acids are negatively charged. In other embodiments, one, two, three or all of the charged amino acids are positively charged. Such modifications increase solubility, e.g. provide at least 2-fold, 5-fold, 10-fold, 15-fold, 25-fold, 30-fold or greater solubility relative to native glucagon at a given pH between about 5.5 and 8, e.g., pH 7, when measured after 24 hours at 25° C.

[0455] (B) Increasing solubility and duration of action or half-life in circulation by addition of a hydrophilic moiety such as a polyethylene glycol chain, as described herein, e.g. at position 16, 17, 20, 21, 24 or 29, within a C-terminal extension, or at the C-terminal amino acid of the peptide,

[0456] (C) Increasing solubility and/or duration of action or half-life in circulation and/or delaying the onset of action by acylation or alkylation of the glucagon peptide, as described herein;

[0457] (D) Increasing duration of action or half-life in circulation through introducing resistance to dipeptidyl peptidase IV (DPP IV) cleavage by modification of the amino acid at position 1 or 2 as described herein.

[0458] (E) Increasing stability by modification of the Asp at position 15, for example, by deletion or substitution with glutamic acid, homoglutamic acid, cysteic acid or homocysteic acid. Such modifications can reduce degradation or cleavage at a pH within the range of 5.5 to 8, for example, retaining at least 75%, 80%, 90%, 95%, 96%, 97%, 98% or 99%, up to 100% of the original peptide after 24 hours at 25° C. Such modifications reduce cleavage of the peptide bond between Asp15-Ser16.

[0459] (F) Increasing stability by modification of the Ser at position 16, for example by substitution with Thr or AIB. Such modifications also reduce cleavage of the peptide bond between Asp15-Ser16.

[0460] (G) Increasing stability by modification of the methionine at position 27, for example, by substitution with leucine or norleucine. Such modifications can reduce oxidative degradation. Stability can also be increased by modification of the Gln at position 20 or 24, e.g. by substitution with Ser, Thr, Ala or AIB. Such modifications can reduce degradation that occurs through deamidation of Gln. Stability can be increased by modification of Asp at position 21, e.g. by substitution with Glu. Such modifications can reduce degradation that occurs through dehydration of Asp to form a cyclic succinimide intermediate followed by isomerization to iso-aspartate.

[0461] (H) Non-conservative or conservative substitutions, additions or deletions that do not substantially affect activity, for example, conservative substitutions at one or more of positions 2, 5, 9, 10, 11, 12, 13, 14, 15, 16, 17, 18, 19, 20, 21, 24, 27, 28 or 29; substitution of one or more of these positions with Ala; deletion of amino acids at one or more of positions 27, 28 or 29; or deletion of amino acid 29 optionally combined with a C-terminal amide or ester in place of the C-terminal carboxylic acid group; substitution of Lys at position 12 with Arg; substitution of Tyr at position 10 with Val or Phe;

[0462] Preservation of activity after pegylation is provided by the addition of GPSSGAPPPS (SEQ ID NO: 1095) to the C-terminus.

[0463] Some positions of the native glucagon peptide can be modified while retaining at least some of the activities of the parent peptide. Accordingly, applicants anticipate that one or more of the amino acids located at positions at positions 2, 5, 10, 11, 12, 13, 14, 17, 18, 19, 20, 21, 24, 27, 28 or 29 can be substituted with an amino acid different from that present in the native glucagon peptide, and still retain activity at the glucagon receptor.

[0464] In some embodiments, position 18 is substituted with an amino acid selected from the group consisting of Ala, Ser, or Thr. In some embodiments the amino acid at position 20 is substituted with Ser, Thr, Lys, Arg, Orn, Citrulline or AIB. In some embodiments, position 21 is substituted with Glu, homoglutamic acid or homocysteic acid. In some embodiments, the glucagon peptide comprises 1 to 10 amino acid modifications selected from positions 16, 17, 18, 20, 21, 23, 24, 27, 28 and 29. In exemplary embodiments, the modifications are one or more amino acid substitutions selected from the group consisting of Gln17, Ala18, Glu21, Ile23, Ala24, Val27 and Gly29. In some embodiments, 1 to 2 amino acids selected from positions 17-26 differ from the parent peptide. In other embodiments, 1 to 2 amino acids selected from positions 17-22 differ from the parent peptide. In yet other embodiments, the modifications are Gln17, Ala18, Glu21, Ile23 and Ala24.

[0465] In some embodiments, one or more amino acids is added to the carboxy terminus of the glucagon peptide. The amino acid is typically selected from one of the 20 common amino acids, and in some embodiments the amino acid has an amide group in place of the carboxylic acid of the native amino acid. In exemplary embodiments the added amino acid is selected from the group consisting of glutamic acid and aspartic acid and glycine.

[0466] Other modifications that do not destroy activity include W10 or R20.

[0467] In some embodiments, the Class 2 glucagon related peptides disclosed herein are modified by truncation of the C-terminus by one or two amino acid residues yet retain similar activity and potency at the glucagon, GLP-1 and/or GIP receptors. In this regard, the amino acid at position 29 and/or 28 can be deleted.

### Exemplary Embodiments

[0468] In accordance with some embodiments of the invention, the analog of glucagon (SEQ ID NO: 1001) having GIP agonist activity comprises SEQ ID NO: 1001 with (a) an amino acid modification at position 1 that confers GIP agonist activity, (b) a modification which stabilizes the alpha helix structure of the C-terminal portion (amino acids 12-29) of the analog, and (c) optionally, 1 to 10 (e.g., 1, 2, 3, 4, 5, 6, 7, 8, 9, 10) further amino acid modifications. In some embodiments, the analog exhibits at least about 1% activity of native GIP at the GIP receptor or any other activity level at the GIP receptor described herein.

[0469] In certain embodiments, the modification which stabilizes the alpha helix structure is one which provides or introduces an intramolecular bridge, including, for example, a covalent intramolecular bridge, such as any of those described herein. The covalent intramolecular bridge in some embodiments is a lactam bridge. The lactam bridge of the analog of these embodiments can be a lactam bridge as described herein. See, e.g., the teachings of lactam bridges under the section “Stabilization of the Alpha Helix Structure.” For example, the lactam bridge may be one which is between the side chains of amino acids at positions i and i+4 or between the side chains of amino acids at positions j and j+3, wherein i is 12, 13, 16, 17, 20 or 24, and wherein j is 17. In certain embodiments, the lactam bridge can be between the amino acids at positions 16 and 20, wherein one of the amino acids at positions 16 and 20 is substituted with Glu and the other of the amino acids at positions 16 and 20 is substituted with Lys.

[0470] In alternative embodiments, the modification which stabilizes the alpha helix structure is the introduction of one, two, three, or four α,α-disubstituted amino acids at position(s) 16, 20, 21, and 24 of the analog. In some embodiments, the α,α-disubstituted amino acid is AIB. In certain aspects, the α,α-disubstituted amino acid (e.g., AIB) is at position 20 and the amino acid at position 16 is substituted with a positive-charged amino acid, such as, for example, an amino acid of Formula IV, which is described herein. The amino acid of Formula IV may be homoLys, Lys, Orn, or 2,4-diaminobutyric acid (Dab).

[0471] In specific aspects of the invention, the amino acid modification at position 1 is a substitution of His with an amino acid lacking an imidazole side chain, e.g. a large, aromatic amino acid (e.g., Tyr).

[0472] In certain aspects, the analog of glucagon comprises amino acid modifications at one, two or all of positions 27, 28 and 29. For example, the Met at position 27 can be substituted with a large aliphatic amino acid, optionally Leu, the Asn at position 28 can be substituted with a small aliphatic amino acid, optionally Ala, the Thr at position 29 can be substituted with a small aliphatic amino acid, optionally Gly, or a combination of two or three of the foregoing. In specific embodiments, the analog of glucagon comprises Leu at position 27, Ala at position 28, and Gly or Thr at position 29.

[0473] In certain embodiments of the invention, the analog of glucagon comprises an extension of 1 to 21 amino acids C-terminal to the amino acid at position 29. The extension can comprise the amino acid sequence of SEQ ID NO: 1095 or 1096, for instance. Additionally or alternatively, the analog of glucagon can comprise an extension of which 1-6 amino acids of the extension are positive-charged amino acids. The positive-charged amino acids may be amino acids of Formula IV, including, but not limited to Lys, homoLys, Orn, and Dab.

[0474] The analog of glucagon in some embodiments is acylated or alkylated as described herein. For instance, the acyl or alkyl group may be attached to the analog of glucagon, with or without a spacer, at position 10 or 40 of the analog, as further described herein. The analog may additionally or alternatively be modified to comprise a hydrophilic moiety as further described herein. Furthermore, in some embodiments, the analog comprises any one or a combination of the following modifications:

[0475] Ser at position 2 substituted with D-Ser, Ala, D-Ala, Gly, N-methyl-Ser, AIB, Val, or α-amino-N-butyric acid;

[0476] Tyr at position 10 substituted with Trp, Lys, Orn, Glu, Phe, or Val:

[0477] Linkage of an acyl group to a Lys at position 10;

[0478] Lys at position 12 substituted with Arg or Ile;

[0479] Ser at position 16 substituted with Glu, Gln, homoglutamic acid, homocysteic acid, Thr, Gly, or AIB;

[0480] Arg at position 17 substituted with Gln;

[0481] Arg at position 18 substituted with Ala, Ser, Thr, or Gly;

[0482] Gln at position 20 substituted with Ser, Thr, Ala, Lys, Citrulline, Arg, Orn, or AIB;

[0483] Asp at position 21 substituted with Glu, homoglutamic acid, homocysteic acid;

[0484] Val at position 23 substituted with Ile; Gln at position 24 substituted with Asn, Ser, Thr, Ala, or AIB;

[0485] and a conservative substitution at any of positions 2 5, 9, 10, 11, 12. 13, 14, 15, 16, 8 19 20, 21. 24, 27, 28, and 29.

[0486] In exemplary embodiments, the analog of glucagon (SEQ ID NO: 1001) having GIP agonist activity comprises the following modifications:

[0487] (a) an amino acid modification at position 1 that confers GIP agonist activity,

[0488] (b) a lactam bridge between the side chains of amino acids at positions i and i+4 or between the side chains of amino acids at positions j and j+3, wherein i is 12, 13, 16, 17, 20 or 24, and wherein j is 17,

[0489] (c) amino acid modifications at one, two or all of positions 27, 28 and 29, e.g., amino acid modifications at position 27 and/or 28, and

[0490] (d) 1-9 or 1-6 further amino acid modifications, e.g. 1, 2, 3, 4, 5, 6, 7, 8 or 9 further amino acid modifications,

[0491] and the EC50 of the analog for GIP receptor activation is about 10 nM or less.

[0492] The lactam bridge of the analog of these embodiments can be a lactam bridge as described herein. See, e.g., the teachings of lactam bridges under the section “Stabilization of the Alpha Helix Structure.” For example, the lactam bridge can be between the amino acids at positions 16 and 20, wherein one of the amino acids at positions 16 and 20 is substituted with Glu and the other of the amino acids at positions 16 and 20 is substituted with Lys.

[0493] In accordance with these embodiments, the analog can comprise, for example, the amino acid sequence of any of SEQ ID NOs: 1005-1094.

[0494] In other exemplary embodiments, the analog of glucagon (SEQ ID NO: 1001) having GIP agonist activity comprises the following modifications:

[0495] (a) an amino acid modification at position 1 that confers GIP agonist activity,

[0496] (b) one, two, three, or all of the amino acids at positions 16, 20, 21, and 24 of the analog is substituted with an α,α-disubstituted amino acid,

[0497] (c) amino acid modifications at one, two or all of positions 27, 28 and 29, e.g., amino acid modifications at position 27 and/or 28, and

[0498] (d) 1-9 or 1-6 further amino acid modifications, e.g. 1, 2, 3, 4, 5, 6, 7, 8 or 9 further amino acid modifications,

[0499] and the EC50 of the analog for GIP receptor activation is about 10 nM or less.

[0500] The α,α-disubstituted amino acid of the analog of these embodiments can be any α,α-disubstituted amino acid, including, but not limited to, amino iso-butyric acid (AIB), an amino acid disubstituted with the same or a different group selected from methyl, ethyl, propyl, and n-butyl, or with a cyclooctane or cycloheptane (e.g., 1-aminocyclooctane-1-carboxylic acid). In certain embodiments, the α,α-disubstituted amino acid is AIB. In certain embodiments, the amino acid at position 20 is substituted with an α,α-disubstituted amino acid, e.g., AIB.

[0501] In accordance with these embodiments, the analog can comprise, for example, the amino acid sequence of any of SEQ ID NOs: 1099-1141, 1144-1164, 1166-1169, and 1173-1178.

[0502] In yet other exemplary embodiments, the analog of glucagon (SEQ ID NO: 1001) having GIP agonist activity comprises the following modifications:

[0503] (a) an amino acid modification at position 1 that confers GIP agonist activity,

[0504] (b) an amino acid substitution of Ser at position 16 with an amino acid of Formula IV:

[chemical structure]

[0505] wherein n is 1 to 16, or 1 to 10, or 1 to 7, or 1 to 6, or 2 to 6, each of R₁ and R₂ is independently selected from the group consisting of H, C₁-C₁₈ alkyl, (C₁-C₁₈ alkyl)OH, (C₁-C₁₈ alkyl)NH₂, (C₁-C₁₈ alkyl)SH, (C₀-C₄ alkyl)(C₃-C₆)cycloalkyl, (C₀-C₄ alkyl)(C₂-C₅ heterocyclic), (C₀-C₄ alkyl)(C₆-C₁₀ aryl)R₇, and (C₁-C₄ alkyl)(C₃-C₉ heteroaryl), wherein R₇ is H or OH, and the side chain of the amino acid of Formula IV comprises a free amino group,

[0506] (c) an amino acid substitution of the Gln at position 20 with an alpha, alpha-disubstituted amino acid,

[0507] (d) amino acid modifications at one, two or all of positions 27, 28 and 29, e.g., amino acid modifications at position 27 and/or 28, and

[0508] (e) 1-9 or 1-6 further amino acid modifications, e.g. 1, 2, 3, 4, 5, 6, 7, 8 or 9 further amino acid modifications,

[0509] and the EC50 of the analog for GIP receptor activation is about 10 nM or less.

[0510] The amino acid of Formula IV of the analog of these embodiments may be any amino acid, such as, for example, the amino acid of Formula IV, wherein n is 1, 2, 3, 4, 5, 6, 7, 8, 9, 10, 11, 12, 13, 14, 15, or 16. In certain embodiments, n is 2, 3, 4, or 5, in which case, the amino acid is Dab, Orn, Lys, or homoLys respectively.

[0511] The alpha, alpha-disubstituted amino acid of the analog of these embodiments may be any alpha, alpha-disubstituted amino acid, including, but not limited to, amino iso-butyric acid (AIB), an amino acid disubstituted with the same or a different group selected from methyl, ethyl, propyl, and n-butyl, or with a cyclooctane or cycloheptane (e.g., 1-aminocyclooctane-1-carboxylic acid). In certain embodiments, the alpha, alpha-disubstituted amino acid is AIB.

[0512] In accordance with these embodiments, the analog can comprise, for example, the amino acid sequence of any of SEQ ID NOs: 1099-1165.

[0513] In yet other exemplary embodiments, the analog of glucagon (SEQ ID NO: 1001) having GIP agonist activity comprises:

[0514] (a) an amino acid modification at position 1 that confers GIP agonist activity, and

[0515] (b) an extension of about 1 to about 21 amino acids C-terminal to the amino acid at position 29, wherein at least one of the amino acids of the extension is acylated or alkylated,

[0516] wherein the EC50 of the analog for GIP receptor activation is about 10 nM or less.

[0517] In some embodiments, the acylated or alkylated amino acid is an amino acid of Formula I, II, or III. In more specific embodiments, the amino acid of Formula I is Dab, Orn, Lys, or homoLys. Also, in some embodiments, the extension of about 1 to about 21 amino acids comprises the amino acid sequence of GPSSGAPPPS (SEQ ID NO: 1095) or XGPSSGAPPPS (SEQ ID NO: 1096), wherein X is any amino acid, or GPSSGAPPPK (SEQ ID NO: 1170) or XGPSSGAPPPK (SEQ ID NO: 1171) or XGPSSGAPPPSK (SEQ ID NO: 1172), wherein X is Gly or a small, aliphatic or non-polar or slightly polar amino acid. In some embodiments, the about 1 to about 21 amino acids may comprise sequences containing one or more conservative substitutions relative to SEQ ID NO: 1095, 1096, 1170, 1171 or 1172. In some embodiments, the acylated or alkylated amino acid is located at position 37, 38, 39, 40, 41, 42, or 43 of the C-terminally-extended analog. In certain embodiments, the acylated or alkylated amino acid is located at position 40 of the C-terminally extended analog.

[0518] In some embodiments, the analog having GIP agonist activity further comprises amino acid modifications at one, two or all of positions 27, 28 and 29, e.g., amino acid modifications at position 27 and/or 28.

[0519] In any of the above exemplary embodiments, the amino acid modification at position 1 that confers GIP agonist activity can be a substitution of His with an amino acid lacking an imidazole side chain. The amino acid modification at position 1 can, for example, be a substitution of His with a large, aromatic amino acid. In some embodiments, the large, aromatic amino acid is any of those described herein, including, for example, Tyr.

[0520] Also, with regard to the above exemplary embodiments, amino acid modifications at one, two, or all of positions 27, 28, and 29 can be any of the modifications at these positions described herein. For example, the Met at position 27 can be substituted with a large aliphatic amino acid, optionally Leu, the Asn at position 28 can be substituted with a small aliphatic amino acid, optionally Ala, and/or the Thr at position 29 can be substituted with a small aliphatic amino acid, optionally Gly. Alternatively, the analog can comprise such amino acid modifications at position 27 and/or 28.

[0521] The analog of the above exemplary embodiments can further comprise 1-9 or 1-6 further, additional amino acid modifications, e.g. 1, 2, 3, 4, 5, 6, 7, 8 or 9 further amino acid modifications, such as, for example, any of the modifications described herein which increase or decrease the activity at any of the GIP, GLP-1, and glucagon receptors, improve solubility, improve duration of action or half-life in circulation, delay the onset of action, or increase stability. The analog can further comprise, for example, an amino acid modification at position 12, optionally, a substitution with Ile, and/or amino acid modifications at positions 17 and 18, optionally substitution with Q at position 17 and A at position 18, and/or an addition of GPSSGAPPPS (SEQ ID NO: 1095) or XGPSSGAPPPS (SEQ ID NO: 1096), or sequences containing one or more conservative substitutions relative to SEQ ID NO: 1095 or 1096, to the C-terminus. The analog can comprise one or more of the following modifications:

[0522] Ser at position 2 substituted with D-Ser, Ala, D-Ala, Gly, N-methyl-Ser, AIB, Val, or α-amino-N-butyric acid;

[0523] Tyr at position 10 substituted with Trp, Lys, Orn, Glu, Phe, or Val;

[0524] Linkage of an acyl group to a Lys at position 10;

[0525] Lys at position 12 substituted with Arg;

[0526] Ser at position 16 substituted with Glu, Gln, homoglutamic acid, homocysteic acid, Thr, Gly, or AIB;

[0527] Arg at position 17 substituted with Gln;

[0528] Arg at position 18 substituted with Ala, Ser, Thr, or Gly;

[0529] Gln at position 20 substituted with Ala, Ser, Thr, Lys, Citrulline, Arg, Orn, or AIB;

[0530] Asp at position 21 substituted with Glu, homoglutamic acid, homocysteic acid;

[0531] Val at position 23 substituted with Ile;

[0532] Gln at position 24 substituted with Asn, Ala, Ser, Thr, or AIB; and

[0533] a conservative substitution at any of positions 2, 5, 9, 10, 11, 12, 13, 14, 15, 16, 17, 18, 19, 20, 21, 24, 27, 28, and 29.

[0534] The analog in some embodiments comprise a combination of the modifications (i) through (xii). Alternatively or additionally, the analog can comprise an amino acid modification at position 3 (e.g., an amino acid substitution of Gln with Glu), wherein the analog has less than 1% of the activity of glucagon at the glucagon receptor. Alternatively or additionally, the analog can comprise an amino acid modification at position 7 (e.g., an amino acid substitution of Thr with an amino acid lacking a hydroxyl group, e.g., Abu or Ile), wherein the analog has less than about 10% of the activity of GLP-1 at the GLP-1 receptor.

[0535] With regard to the exemplary embodiments, the analog can be covalently linked to a hydrophilic moiety. In some embodiments, the analog is covalently linked to the hydrophilic moiety at any of amino acid positions 16, 17, 20, 21, 24, 29, 40, or the C-terminus. In certain embodiments, the analog comprises a C-terminal extension (e.g., an amino acid sequence of SEQ ID NO: 1095) and an addition of an amino acid comprising the hydrophilic moiety, such that the hydrophilic moiety is covalently linked to the analog at position 40.

[0536] In some embodiments, the hydrophilic moiety is covalently linked to a Lys, Cys, Orn, homocysteine, or acetyl-phenylalanine of the analog. The Lys, Cys, Orn, homocysteine, or acetyl-phenylalanine may be an amino acid that is native to the glucagon sequence (SEQ ID NO: 1001) or it may be an amino acid which is replacing a native amino acid of SEQ ID NO: 1001. In some embodiments, wherein the hydrophilic moiety is attached to a Cys, the linkage to the hydrophilic moiety can comprise the structure

[chemical structure]

[0537] With regard to the analogs comprising a hydrophilic moiety, the hydrophilic moiety may be any of those described herein. See, e.g., the teachings under the section “Linkage of hydrophilic moieties.” In some embodiments, the hydrophilic moiety is a polyethylene glycol (PEG). The PEG in certain embodiments has a molecular weight of about 1,000 Daltons to about 40,000 Daltons, e.g., about 20,000 Daltons to about 40,000 Daltons.

[0538] With regard to the exemplary embodiments, the analog can comprise a modified amino acid in which the side chain is covalently linked to an acyl or alkyl group (e.g., an acyl or alkyl group which is non-native to a naturally-occurring amino acid). The acylated or alkylated analog can be in accordance with acylated or alkylated peptides described in the section “Acylation and alkylation.” In some embodiments, the acyl group is a C4 to a C30 fatty acyl group, such as, for example, a C10 fatty acyl or alkyl group, a C12 fatty acyl or alkyl group, a C14 fatty acyl or alkyl group, a C16 fatty acyl or alkyl group, a C18 fatty acyl or alkyl group, a C20 acyl or alkyl group, or a C22 acyl or alkyl group. The acyl or alkyl group may be covalently attached to any amino acid of the analog, including, but not limited to the amino acid at position 10 or 40, or the C-terminal amino acid. In certain embodiments, the analog comprises a C-terminal extension (e.g., an amino acid sequence of SEQ ID NO: 1095) and an addition of an amino acid comprising the acyl or alkyl group, such that the acyl or alkyl group is covalently linked to the analog at position 40. In some embodiments, the acyl or alkyl group is covalently linked to the side chain of an amino acid of Formula I, II, or III, e.g., a Lys residue. The acyl or alkyl group may be covalently linked to an amino acid which is native to the glucagon sequence (SEQ ID NO: 1001) or may be linked to an amino acid which is added to the sequence of SEQ ID NO: 1001 or to the sequence of SEQ ID NO: 1001 followed by SEQ ID NO: 1095 (at the N- or C-terminus) or may be linked to an amino acid which replaces a native amino acid, e.g., the Tyr at position 10 of SEQ ID NO: 1001.

[0539] In the above exemplary embodiments, wherein the analog comprises an acyl or alkyl group, the analog may be attached to the acyl or alkyl group via a spacer, as described herein. The spacer, for example, may be 3 to 10 atoms in length and may be, for instance, an amino acid (e.g., 6-amino hexanoic acid, any amino acid described herein), a dipeptide (e.g., Ala-Ala, βAla-βAla, Leu-Leu, Pro-Pro, γGlu-γGlu), a tripeptide, or a hydrophilic or hydrophobic bifunctional spacer. In certain aspects, the total length of the spacer and the acyl or alkyl group is about 14 to about 28 atoms. In some embodiments, the amino acid spacer is not γ-Glu. In some embodiments, the dipeptide spacer is not γ-Glu-γ-Glu.

[0540] In still further exemplary embodiments, the analog of glucagon having GIP agonist activity comprises the amino acid sequence according to any one of SEQ ID NOs: 1227, 1228, 1229 or 1230 that further comprises the following modifications:

[0541] (a) optionally, an amino acid modification at position 1 that confers GIP agonist activity,

[0542] (b) an extension of about 1 to about 21 amino acids C-terminal to the amino acid at position 29, wherein at least one of the amino acids of the extension is acylated or alkylated, and

[0543] (d) up to 6 further amino acid modifications,

[0544] wherein the EC50 of the analog for GIP receptor activation is about 10 nM or less.

[0545] In some aspects, the acylated or alkylated amino acid is an amino acid of Formula I, II, or III. In more specific embodiments, the amino acid of Formula I is Dab, Orn, Lys, or homoLys. Also, in some embodiments, the about 1 to about 21 amino acids comprises the amino acid sequence of GPSSGAPPPS (SEQ ID NO: 1095) or XGPSSGAPPPS (SEQ ID NO: 1096), wherein X is any amino acid, or GPSSGAPPPK (SEQ ID NO: 1170) or XGPSSGAPPPK (SEQ ID NO: 1171) or XGPSSGAPPPSK (SEQ ID NO: 1172), wherein X is Gly or a small, aliphatic or non-polar or slightly polar amino acid. In some embodiments, the about 1 to about 21 amino acids may comprise sequences containing one or more conservative substitutions relative to SEQ ID NO: 1095, 1096, 1170, 1171 or 1172. In some embodiments, the acylated or alkylated amino acid is located at position 37, 38, 39, 40, 41, 42, or 43 of the C-terminally-extended analog. In certain embodiments, the acylated or alkylated amino acid is located at position 40 of the C-terminally extended analog.

[0546] In any of the above exemplary embodiments, the amino acid at position 1 that confers GIP agonist activity can be an amino acid lacking an imidazole side chain. The amino acid at position 1 can, for example, be a large, aromatic amino acid. In some embodiments, the large, aromatic amino acid is any of those described herein, including, for example, Tyr.

[0547] The analog of the above exemplary embodiments can further comprise 1-6 further amino acid modifications, such as, for example, any of the modifications described herein which increase or decrease the activity at any of the GIP, GLP-1, and glucagon receptors, improve solubility, improve duration of action or half-life in circulation, delay the onset of action, or increase stability.

[0548] In certain aspects, glucagon analogs described in the above exemplary embodiment, comprise further amino acid modifications at one, two or all of positions 27, 28 and 29. Modifications at these positions can be any of the modifications described herein relative to these positions. For example, relative to SEQ ID NO: 1227, 1228, 1229 or 1230, position 27 can be substituted with a large aliphatic amino acid (e.g., Leu, Ile or norleucine) or Met, position 28 can be substituted with another small aliphatic amino acid (e.g., Gly or Ala) or Asn, and/or position 29 can be substituted with another small aliphatic amino acid (e.g., Ala or Gly) or Thr. Alternatively, the analog can comprise such amino acid modifications at position 27 and/or 28.

[0549] The analog can further comprise one or more of the following additional modifications:

[0550] the amino acid at position 2 is any one of D-Ser, Ala, D-Ala, Gly, N-methyl-Ser, AIB, Val, or α-amino-N-butyric acid;

[0551] the amino acid at position 10 is Tyr, Trp, Lys, Orn, Glu, Phe, or Val;

[0552] linkage of an acyl group to a Lys at position 10;

[0553] the amino acid at position 12 is Ile, Lys or Arg;

[0554] the amino acid at position 16 is any one of Ser, Glu, Gln, homoglutamic acid, homocysteic acid, Thr, Gly, or AIB;

[0555] the amino acid at position 17 is Gln or Arg;

[0556] the amino acid at position 18 is any one of Ala, Arg, Ser, Thr, or Gly;

[0557] the amino acid at position 20 is any one of Ala, Ser, Thr, Lys, Citrulline, Arg, Orn, or AIB or another alpha, alpha-disubstituted amino acid;

[0558] the amino acid at position 21 is any one of Glu, Asp, homoglutamic acid, homocysteic acid;

[0559] the amino acid at position 23 is Val or Ile;

[0560] the amino acid at position 24 is any one of Gln, Asn, Ala, Ser, Thr, or AIB; and

[0561] one or more conservative substitutions at any of positions 2, 5, 9, 10, 11, 12, 13, 14, 15, 16, 17, 18, 19, 20, 21, 24, 27, 28, and 29.

[0562] The analog in some embodiments comprise a combination of the modifications (i) through (xii). Alternatively or additionally, the analog can comprise an amino acid modification at position 3 (e.g., an amino acid substitution of Gln with Glu), wherein the analog has less than 1% of the activity of glucagon at the glucagon receptor. Alternatively or additionally, the analog can comprise an amino acid modification at position 7 (e.g., an amino acid substitution of Thr with an amino acid lacking a hydroxyl group, e.g., Abu or Ile), wherein the analog has less than about 10% of the activity of GLP-1 at the GLP-1 receptor.

[0563] With regard to the exemplary embodiments, the analog can be covalently linked to a hydrophilic moiety. In some embodiments, the analog is covalently linked to the hydrophilic moiety at any of amino acid positions 16, 17, 20, 21, 24, 29, 40, or the C-terminus. In certain embodiments, the analog comprises a hydrophilic moiety covalently linked to the analog at position 24.

[0564] In some embodiments, the hydrophilic moiety is covalently linked to a Lys, Cys, Orn, homocysteine, or acetyl-phenylalanine of the analog. The Lys, Cys,

[0565] Orn, homocysteine, or acetyl-phenylalanine may be an amino acid that is native to SEQ ID NO: 1001, 1227, 1228, 1229 or 1230 or it may be a substituted amino acid. In some embodiments, wherein the hydrophilic moiety is linked to a Cys, the linkage may comprise the structure

[chemical structure]

[0566] With regard to the analogs comprising a hydrophilic moiety, the hydrophilic moiety may be any of those described herein. See, e.g., the teachings under the section “Linkage of hydrophilic moieties.” In some embodiments, the hydrophilic moiety is a polyethylene glycol (PEG). The PEG in certain embodiments has a molecular weight of about 1,000 Daltons to about 40,000 Daltons, e.g., about 20,000 Daltons to about 40,000 Daltons.

[0567] With regard to the exemplary embodiments, the analog can comprise a modified amino acid within the C-terminal extension in which the side chain is covalently linked to an acyl or alkyl group. The acylated or alkylated analog can be in accordance with acylated or alkylated peptides described in the section “Acylation and alkylation.” In some embodiments, the acyl group is a C4 to a C30 fatty acyl group, such as, for example, a C10 fatty acyl or alkyl group, a C12 fatty acyl or alkyl group, a C14 fatty acyl or alkyl group, a C16 fatty acyl or alkyl group, a C18 fatty acyl or alkyl group, a C20 acyl or alkyl group, or a C22 acyl or alkyl group. The acyl or alkyl group may be covalently attached to any amino acid of the analog, including, but not limited to the amino acid at position 10 or 40, or the C-terminal amino acid. In some embodiments, the acyl or alkyl group is covalently linked to the side chain of an amino acid of Formula I, II, or III, e.g., a Lys residue. The acyl or alkyl group is covalently linked to an amino acid which is native to SEQ ID NO: 1001, 1227, 1228, 1229 or 1230 or it may be linked to a substituted amino acid. The acyl or alkyl group is covalently linked to an amino acid which is native to SEQ ID NO: 1095, 1096, 1171 or 1172, or it may be linked to a substituted amino acid.

[0568] In the above exemplary embodiments, wherein the analog comprises an acyl or alkyl group, the analog may be attached to the acyl or alkyl group via a spacer, as described herein. The spacer, for example, may be 3 to 10 atoms in length and may be, for instance, an amino acid (e.g., 6-amino hexanoic acid, any amino acid described herein), a dipeptide (e.g., Ala-Ala, βAla-βAla, Leu-Leu, Pro-Pro, γGlu-γGlu), a tripeptide, or a hydrophilic or hydrophobic bifunctional spacer. In certain aspects, the total length of the spacer and the acyl or alkyl group is about 14 to about 28 atoms. In some embodiments, the amino acid spacer is not γ-Glu. In some embodiments, the dipeptide spacer is not γ-Glu-γ-Glu.

[0569] In some very specific embodiments, an analog of the invention comprises an amino acid sequence selected from the group consisting of SEQ ID NOs: 1099-1141, 1144-1164, 1166, 1192-1207, 1209-1221 and 1223 or selected from the group consisting of SEQ ID NOs: 1167-1169, 1173-1178 and 1225.

[0570] Further, specific examples of analogs of the invention include but are not limited to, any of those referenced in Tables 1-3.

[0571] In still further exemplary embodiments, the analog of glucagon having GIP agonist activity comprises an acyl or alkyl group (e.g., an acyl or alkyl group which is non-native to a naturally occurring amino acid), wherein the acyl or alkyl group is attached to a spacer, wherein (i) the spacer is attached to the side chain of the amino acid at position 10 of the analog; or (ii) the analog comprises an extension of 1 to 21 amino acids C-terminal to the amino acid at position 29 and the spacer is attached to the side chain of an amino acid corresponding to one of positions 37-43 relative to SEQ ID NO: 1001, wherein the EC50 of the analog for GIP receptor activation is about 10 nM or less.

[0572] In such embodiments, the analog may comprise an amino acid sequence of SEQ ID NO: 1001 with (i) an amino acid modification at position 1 that confers GIP agonist activity, (ii) amino acid modifications at one, two, or all of positions 27, 28, and 29, (iii) at least one of:
[0573] (A) the analog comprises a lactam bridge between the side chains of amino acids at positions i and i+4 or between the side chains of amino acids at positions j and j+3, wherein i is 12, 13, 16, 17, 20 or 24, and wherein j is 17;
[0574] (B) one, two, three, or all of the amino acids at positions 16, 20, 21, and 24 of the analog is substituted with an α,α-disubstituted amino acid; or
[0575] (C) the analog comprises (i) an amino acid substitution of Ser at position 16 with an amino acid of Formula IV:

[chemical structure]

[0576] wherein n is 1 to 7, wherein each of R1 and R2 is independently selected from the group consisting of H, C₁-C₁₈ alkyl, (C₁-C₁₈ alkyl)OH, (C₁-C₁₈ alkyl)NH₂, (C₁-C₁₈ alkyl)SH, (C₀-C₄ alkyl)(C₃-C₆)cycloalkyl, (C₀-C₄ alkyl)(C₂-C₅ heterocyclic), (C₀-C₄ alkyl)(C₆-C₁₀ aryl)R₇, and (C₁-C₄ alkyl)(C₃-C₉ heteroaryl), wherein R₇ is H or OH, and the side chain of the amino acid of Formula IV comprises a free amino group; and (ii) an amino acid substitution of the Gln at position 20 with an alpha, alpha-disubstituted amino acid.

[0577] and (iv) up to 6 further amino acid modifications.

[0578] The alpha, alpha-disubstituted amino acid of the analog of these embodiments may be any alpha, alpha-disubstituted amino acid, including, but not limited to, amino iso-butyric acid (AIB), an amino acid disubstituted with the same or a different group selected from methyl, ethyl, propyl, and n-butyl, or with a cyclooctane or cycloheptane (e.g., 1-aminocyclooctane-1-carboxylic acid). In certain embodiments, the alpha, alpha-disubstituted amino acid is AIB.

[0579] The amino acid of Formula IV of the analog of these embodiments may be any amino acid, such as, for example, the amino acid of Formula IV, wherein n is 1, 2, 3, 4, 5, 6, 7, 8, 9, 10, 11, 12, 13, 14, 15, or 16. In certain embodiments, n is 2, 3, 4, or 5, in which case, the amino acid is Dab, Orn, Lys, or homoLys respectively.

[0580] In any of the above exemplary embodiments, the amino acid modification at position 1 that confers GIP agonist activity can be a substitution of His with an amino acid lacking an imidazole side chain. The amino acid modification at position 1 can, for example, be a substitution of His with a large, aromatic amino acid. In some embodiments, the large, aromatic amino acid is any of those described herein, including, for example, Tyr.

[0581] Also, with regard to the above exemplary embodiments, amino acid modifications at one, two, or all of positions 27, 28, and 29 can be any of the modifications at these positions described herein. For example, the Met at position 27 can be substituted with a large aliphatic amino acid, optionally Leu, the Asn at position 28 can be substituted with a small aliphatic amino acid, optionally Ala, and/or the Thr at position 29 can be substituted with a small aliphatic amino acid, optionally Gly. Alternatively, the analog can comprise such amino acid modifications at position 27 and/or 28.

[0582] The analog of the above exemplary embodiments can further comprise 1-9 or 1-6 further, additional amino acid modifications, e.g. 1, 2, 3, 4, 5, 6, 7, 8 or 9 further amino acid modifications, such as, for example, any of the modifications described herein which increase or decrease the activity at any of the GIP, GLP-1, and glucagon receptors, improve solubility, improve duration of action or half-life in circulation, delay the onset of action, or increase stability. The analog can further comprise, for example, an amino acid modification at position 12, optionally, a substitution with Ile, and/or amino acid modifications at positions 17 and 18, optionally substitution with Q at position 17 and A at position 18, and/or an addition of GPSSGAPPPS (SEQ ID NO: 1095) or XGPSSGAPPPS (SEQ ID NO: 1096), or sequences containing one or more conservative substitutions relative to SEQ ID NO: 1095 or 1096, to the C-terminus. The analog can comprise one or more of the following modifications:

[0583] Ser at position 2 substituted with D-Ser, Ala, D-Ala, Gly, N-methyl-Ser, AIB, Val, or α-amino-N-butyric acid;

[0584] Tyr at position 10 substituted with Trp, Lys, Orn, Glu, Phe, or Val;

[0585] Linkage of an acyl group to a Lys at position 10;

[0586] Lys at position 12 substituted with Arg;

[0587] Ser at position 16 substituted with Glu, Gln, homoglutamic acid, homocysteic acid, Thr, Gly, Lys, or AIB;

[0588] Arg at position 17 substituted with Gln;

[0589] Arg at position 18 substituted with Ala, Ser, Thr, or Gly;

[0590] Gln at position 20 substituted with Ala, Ser, Thr, Lys, Citrulline, Arg, Orn, or AIB;

[0591] Asp at position 21 substituted with Glu, homoglutamic acid, homocysteic acid;

[0592] Val at position 23 substituted with Ile;

[0593] Gln at position 24 substituted with Asn, Ala, Ser, Thr, or AIB; and

[0594] a conservative substitution at any of positions 2, 5, 9, 10, 11, 12, 13, 14, 15, 16, 17, 18, 19, 20, 21, 24, 27, 28, and 29.

[0595] The analog in some embodiments comprise a combination of the modifications (i) through (xii). Alternatively or additionally, the analog can comprise an amino acid modification at position 3 (e.g., an amino acid substitution of Gln with Glu), wherein the analog has less than 1% of the activity of glucagon at the glucagon receptor. Alternatively or additionally, the analog can comprise an amino acid modification at position 7 (e.g., an amino acid substitution of Thr with an amino acid lacking a hydroxyl group, e.g., Abu or Ile), a deletion of the amino acid(s)C-terminal to the amino acid at position 27 or 28, yielding a 27- or 28-amino acid peptide, or a combination thereof, wherein the analog has less than about 10% of the activity of GLP-1 at the GLP-1 receptor.

[0596] With regard to the exemplary embodiments, the analog can be covalently linked to a hydrophilic moiety. In some embodiments, the analog is covalently linked to the hydrophilic moiety at any of amino acid positions 16, 17, 20, 21, 24, 29, 40, or the C-terminus. In certain embodiments, the analog comprises a C-terminal extension (e.g., an amino acid sequence of SEQ ID NO: 1095) and an addition of an amino acid comprising the hydrophilic moiety, such that the hydrophilic moiety is covalently linked to the analog at position 40.

[0597] In some embodiments, the hydrophilic moiety is covalently linked to a Lys, Cys, Orn, homocysteine, or acetyl-phenylalanine of the analog. The Lys, Cys, Orn, homocysteine, or acetyl-phenylalanine may be an amino acid that is native to the glucagon sequence (SEQ ID NO: 1001) or it may be an amino acid which is replacing a native amino acid of SEQ ID NO: 1001. In some embodiments, wherein the hydrophilic moiety is attached to a Cys, the linkage to the hydrophilic moiety can comprise the structure

[chemical structure]

[0598] With regard to the analogs comprising a hydrophilic moiety, the hydrophilic moiety may be any of those described herein. See, e.g., the teachings under the section “Linkage of hydrophilic moieties.” In some embodiments, the hydrophilic moiety is a polyethylene glycol (PEG). The PEG in certain embodiments has a molecular weight of about 1,000 Daltons to about 40,000 Daltons, e.g., about 20,000 Daltons to about 40,000 Daltons.

[0599] In the exemplary embodiments, wherein the analog comprises an acyl or alkyl group, which is attached to the analog via a spacer, the spacer can be any spacer as described herein. The spacer, for example, may be 3 to 10 atoms in length and may be, for instance, an amino acid (e.g., 6-amino hexanoic acid, any amino acid described herein), a dipeptide (e.g., Ala-Ala, βAla-βAla, Leu-Leu, Pro-Pro, γGlu-γGlu), a tripeptide, or a hydrophilic or hydrophobic bifunctional spacer. In certain aspects, the total length of the spacer and the acyl or alkyl group is about 14 to about 28 atoms. In some embodiments, the amino acid spacer is not γ-Glu. In some embodiments, the dipeptide spacer is not γ-Glu-γ-Glu.

[0600] The acyl or alkyl group is any acyl or alkyl group as described herein, such as an acyl or alkyl group which is non-native to a naturally occurring amino acid. The acyl or alkyl group in some embodiments is a C4 to C30 fatty acyl group, such as, for example, a C10 fatty acyl or alkyl group, a C12 fatty acyl or alkyl group, a C14 fatty acyl or alkyl group, a C16 fatty acyl or alkyl group, a C18 fatty acyl or alkyl group, a C20 acyl or alkyl group, or a C22 acyl or alkyl group, or a C4 to C30 alkyl group. In specific embodiments, the acyl group is a C12 to C18 fatty acyl group (e.g., a C14 or C16 fatty acyl group).

[0601] In some embodiments, the extension of about 1 to about 21 amino acids C-terminal to the amino acid at position 29 of the analog comprises the amino acid sequence of GPSSGAPPPS (SEQ ID NO: 1095) or XGPSSGAPPPS (SEQ ID NO: 1096), wherein X is any amino acid, or GPSSGAPPPK (SEQ ID NO: 1170) or XGPSSGAPPPK (SEQ ID NO: 1171) or XGPSSGAPPPSK (SEQ ID NO: 1172), wherein X is Gly or a small, aliphatic or non-polar or slightly polar amino acid. In some embodiments, the about 1 to about 21 amino acids may comprise sequences containing one or more conservative substitutions relative to SEQ ID NO: 1095, 1096, 1170, 1171 or 1172. In some embodiments, the acylated or alkylated amino acid is located at position 37, 38, 39, 40, 41, 42, or 43 of the C-terminally-extended analog. In certain embodiments, the acylated or alkylated amino acid is located at position 40 of the C-terminally extended analog.

[0602] The GIP agonist may be a peptide comprising the amino acid sequence of any of the amino acid sequences, e.g., SEQ ID NOs: 1005-1094, optionally with up to 1, 2, 3, 4, or 5 further modifications that retain GIP agonist activity. In certain embodiments, the GIP agonist comprises the amino acids of any of SEQ ID NOs: 1099-1262.

### Further Exemplary Embodiments

[0603] In some aspects of the invention, the analogs which exhibit agonist activity at the GIP receptor comprise SEQ ID NO: 1001 (native glucagon) with at least one amino acid modification and an extension of 1 to 21 amino acids (e.g., 5 to 18, 7 to 15, 9 to 12 amino acids)C-terminal to the amino acid at position 29 of the analog.

[0604] In certain aspects, the analogs comprise at least one amino acid modification and up to 15 amino acid modifications (e.g., no more than 15 amino acid modifications, no more than 10 amino acid modifications). For example, the analog can comprise SEQ ID NO: 1001 with 1, 2, 3, 4, 5, 6, 7, 8, 9, 10, 11, 12, 13, 14, or 15 amino acid modifications. In certain embodiments, the analogs comprise at least one amino acid modification at up to 10 amino acid modifications and additional conservative amino acid modifications. In further aspects, at least one of the amino acid modifications confers a stabilized alpha helix structure in the C-terminal portion of the analog. Modifications which achieve a stabilized alpha helix structure are described herein. See, for example, the teachings under the section entitled Stabilization of the Alpha-Helix Structure.

[0605] Analogs comprising an acylated or alkylated C-terminal extension (of 1-21 amino acids) unexpectedly exhibited an increased agonist activity at the GIP receptor. Thus, in certain aspects, at least one of the amino acids of the extension located at any of positions 37-43 (according to the numbering of SEQ ID NO: 1001) comprises an acyl or alkyl group which is non-native to a naturally-occurring amino acid, i.e., the extension is acylated or alkylated. In some embodiments, the acyl or alkyl group is attached directly to the amino acid, e.g., via the side chain of the amino acid. In other embodiments, the acyl or alkyl group is attached to the amino acid via a spacer (e.g., an amino acid, a dipeptide, a tripeptide, a hydrophilic bifunctional spacer, a hydrophobic bifunctional spacer). Suitable amino acids comprising an acyl or alkyl group, as well as suitable acyl groups and alkyl groups, are described herein. See, for example, the teachings under the sections entitled Acylation and/or Alkylation, as well as LINKAGE OF A-B to an Acyl OR ALKYL Group.

[0606] In other embodiments, 1-6 amino acids (e.g., 1-2, 1-3, 1-4, 1-5 amino acids) of the C-terminal extension are positive-charged amino acids, e.g., amino acids of Formula IV, such as, for example, Lys. As used herein, the term “positive-charged amino acid” refers to any amino acid, naturally-occurring or non-naturally occurring, comprising a positive charge on an atom of its side chain at a physiological pH (e.g., pH 6.8 to 8.0, pH 7.0 to 7.7). In certain aspects, the positive-charged amino acids are located at any of positions 37, 38, 39, 40, 41, 42, and 43. In specific embodiments, a positive-charged amino acid is located at position 40.

[0607] In other instances, the extension is acylated or alkylated as described herein and comprises 1-6 positive charged amino acids as described herein.

[0608] In yet other embodiments, the analogs which exhibit agonist activity at the GIP receptor comprises (i) SEQ ID NO: 1001 with at least one amino acid modification, (ii) an extension of 1 to 21 amino acids (e.g., 5 to 18, 7 to 15, 9 to 12 amino acids)C-terminal to the amino acid at position 29 of the analog, and (iii) an amino acid comprising an acyl or alkyl group which is non-native to a naturally-occurring amino acid which is located outside of the C-terminal extension (e.g., at any of positions 1-29). In some embodiments, the analog comprises an acylated or alkylated amino acid at position 10. In particular aspects, the acyl or alkyl group is a C4 to C30 fatty acyl or C4 to C30 alkyl group. In some embodiments, the acyl or alkyl group is attached via a spacer, e.g., an amino acid, dipeptide, tripeptide, hydrophilic bifunctional spacer, hydrophobic bifunctional spacer). In certain aspects, the analog comprises an amino acid modification which stabilizes the alpha helix, such as a salt bridge between a Glu at position 16 and a Lys at position 20, or an alpha, alpha-disubstituted amino acid at any one, two, three, or more of positions 16, 20, 21, and 24. In specific aspects, the analog additionally comprises amino acid modifications which confer DPP-IV protease resistance. Analogs comprising further amino acid modifications are contemplated herein.

[0609] In certain embodiments, the analogs having GIP receptor activity exhibit at least 0.1% (e.g., at least 0.5%, 1%, 2%, 5%, 10%, 15%, or 20%) activity of native GIP at the GIP receptor. In some embodiments, the analogs exhibit more than 20% (e.g., more than 50%, more than 75%, more than 100%, more than 200%, more than 300%, more than 500%) activity of native GIP at the GIP receptor. In some embodiments, the analog exhibits appreciable agonist activity at one or both of the GLP-1 and glucagon receptors. In some aspects, the selectivity for these receptors (GIP receptor and GLP-1 receptor and/or glucagon receptor) are within 100-fold. For example, the selectivity for the GLP-1 receptor of the analogs having GIP receptor activity can be less than 100-fold, within 50-fold, within 25 fold, within 15 fold, within 10 fold) the selectivity for the GIP receptor and/or the glucagon receptor.

[0610] GLP-1 activity may be reduced by comprising (i) a C-terminal alpha carboxylate group, (ii) a substitution of the Thr at position 7 with an amino acid lacking a hydroxyl group, e.g., Abu or Ile, (iii) a deletion of the amino acid(s)C-terminal to the amino acid at position 27 or 28 (e.g., deletion of the amino acid at position 28, deletion of the amino acid at positions 28 and 29) to yield a peptide 27 or 28 amino acids in length, or (iv) a combination thereof.

[0611] In some embodiments of the invention, an analog of a glucagon peptide, which analog exhibits agonist activity at the GIP receptor, is provided. The analog in certain embodiments comprises the amino acid sequence of SEQ ID NO: 1001 with at least one amino acid modification (optionally, up to 15 amino acid modifications), and an extension of 1 to 21 amino acids C-terminal to the amino acid at position 29 of the analog.

[0612] In certain aspects, the analogs comprise at least one amino acid modification and up to 15 amino acid modifications (e.g., 1, 2, 3, 4, 5, 6, 7, 8, 9, 10, 11, 12, 13, 14, 15 amino acid modifications, up to 10 amino acid modifications). In certain embodiments, the analogs comprise at least one amino acid modification at up to 10 amino acid modifications and additional conservative amino acid modifications. Conservative amino acid modifications are described herein.

[0613] In some aspects, at least one of the amino acid modifications confers a stabilized alpha helix structure in the C-terminal portion of the analog. Modifications which achieve a stabilized alpha helix structure are described herein. See, for example, the teachings under the section entitled Stabilization of the Alpha-Helix Structure. In some aspects, the analog comprises an intramolecular bridge (e.g., a covalent intramolecular bridge, a non-covalent intramolecular bridge) between the side chains of two amino acids of the analog. In certain aspects, an intramolecular bridge links the side chains of the amino acids at positions i and i+4, wherein i is 12, 13, 16, 17, 20, or 24. In other aspects, an intramolecular bridge connects the side chains of the amino acids at positions j and j+3, wherein j is 17, or at positions k and k+7″ wherein k is any integer between 12 and 22. In certain embodiments, the intramolecular bridge is a covalent intramolecular bridge, e.g., a lactam bridge. In specific aspects, the lactam bridge connects the side chains of the amino acids at positions 16 and 20. In particular aspects, one of the amino acids at positions 16 and 20 is a positive-charged amino acid and the other is a negative-charged amino acid. For example, the analog can comprise a lactam bridge connecting the side chains of a Glu at position 16 and a Lys at position 20. In other aspects, the negative-charged amino acid and the positive-charged amino acid form a salt bridge. In this instance, the intramolecular bridge is a non-covalent intramolecular bridge.

[0614] In particular aspects, the amino acid modification which confers a stabilized alpha helix is an insertion or substitution of an amino acid of SEQ ID NO: 1001 with an α,α-disubstituted amino acid. Suitable α,α-disubstituted amino acids for purposes of stabilizing the alpha helix are described herein and include, for example, AIB. In some aspects, one, two, three, or more of the amino acids at positions 16, 20, 21, and 24 of SEQ ID NO: 1001 are substituted with an α,α-disubstituted amino acid, e.g., AIB. In particular embodiments, the amino acid at position 16 is AIB.

[0615] The analog which exhibits agonist activity at the GIP receptor can comprise additional modifications, such as any of those described herein. For instance, the amino acid modifications may increase or decrease activity at one or both of the GLP-1 receptor and glucagon receptor. The amino acid modifications may increase stability of the peptide, e.g., increase resistance to DPP-IV protease degradation, stabilize the bond between amino acids 15 and 16. The amino acid modifications may increase the solubility of the peptide and/or alter the time of action of the analog at any of the GIP, glucagon, and GLP-1 receptors. A combination of any of these types of modifications may be present in the analogs which exhibit agonist activity at the GIP receptor.

[0616] Accordingly, in some aspects, the analog comprises the amino acid sequence of SEQ ID NO: 1001 with one or more of: Gln at position 17, Ala at position 18, Glu at position 21, Ile at position 23, and Ala, Asn, or Cys at position 24, or conservative amino acid substitutions thereof. In some aspects, the analog comprises a C-terminal amide in place of the C-terminal alpha carboxylate. In certain embodiments, the analog comprises an amino acid substitution at position 1, position 2, or positions 1 and 2, which substitution(s) achieve DPP-IV protease resistance. Suitable amino acid substitutions are described herein. For example, DMIA at position 1 and/or d-Ser or AIB at position 2.

[0617] In some embodiments, the analog is modified at positions 27 and/or 28, and optionally at position 29. For example, the Met at position 27 is substituted with a large aliphatic amino acid, optionally Leu, the Asn at position 28 is substituted with a small aliphatic amino acid, optionally Ala, and the Thr at position 29 is substituted with a small aliphatic amino acid, optionally Gly. Without being bound to any particular theory, it is believed that substitution with LAG at positions 27-29 provides increased GIP activity relative to the native MNT sequence of SEQ ID NO: 1001 at those positions. In some aspects, the amino acid at position 1 is an amino acid comprising an imidazole ring, e.g., His, analogs of His, and the analog is modified at positions 27 and/or 28, and optionally at position 29, as described herein.

[0618] Additionally or alternatively, the analog may comprise one or a combination of: (a) Ser at position 2 substituted with Ala; (b) Gln at position 3 substituted with Glu or a glutamine analog; (c) Thr at position 7 substituted with a Ile; (d) Tyr at position 10 substituted with Trp or an amino acid comprising an acyl or alkyl group which is non-native to a naturally-occurring amino acid; (e) Lys at position 12 substituted with Ile; (f) Asp at position 15 substituted with Glu; (g) Ser at position 16 substituted with Glu; (h) Gln at position 20 substituted with Ser, Thr, Ala, AIB; (i) Gln at position 24 substituted with Ser, Thr, Ala, AIB; (j) Met at position 27 substituted with Leu or Nle; (k) Asn at position 29 substituted with a charged amino acid, optionally, Asp or Glu; and (1) Thr at position 29 substituted with Gly or a charged amino acid, optionally, Asp or Glu.

[0619] In certain aspects, the analog does not comprise an amino acid modification at position 1 which modification confers GIP agonist activity. In some aspects, the amino acid at position 1 is not a large, aromatic amino acid, e.g., Tyr. In some embodiments, the amino acid at position 1 is an amino acid comprising an imidazole ring, e.g., His, analogs of His. In certain embodiments, the analog is not any of the compounds disclosed in U.S. Patent Application No. 61/151,349. In certain aspects, the analog comprises the amino acid sequence of any of SEQ ID NOs: 657-669. In certain aspects, the analog comprises a modified amino acid sequence of any of SEQ ID NOs: 657-669 in which the amino acid at position 12 is Ile and/or the amino acid at position 27 is Leu and/or the amino acid at position 28 is Ala. In some aspects, the analog comprises the amino acid sequence of any of SEQ ID NOs: 676, 677, 679, 680

[0620] With regard to the analogs which exhibit agonist activity at the GIP receptor, the analog comprises an extension of 1-21 amino acids (e.g., 5-19, 7-15, 9-12 amino acids). The extension of the analog may comprise any amino acid sequence, provided that the extension is 1 to 21 amino acids. In some aspects, the extension is 7 to 15 amino acids and in other aspects, the extension is 9 to 12 amino acids. In some embodiments, the extension comprises (i) the amino acid sequence of SEQ ID NO: 26 or 674, (ii) an amino acid sequence which has high sequence identity (e.g., at least 80%, 85%, 90%, 95%, 98%, 99%) with the amino acid sequence of SEQ ID NO: 26 or 674, or (iii) the amino acid sequence of (i) or (ii) with one or more conservative amino acid modifications.

[0621] In some embodiments, at least one of the amino acids of the extension is acylated or alkylated. The amino acid comprising the acyl or alkyl group may be located at any position of extension of the analog. In certain embodiments, the acylated or alkylated amino acid of the extension is located at one of positions 37, 38, 39, 40, 41, or 42 (according to the numbering of SEQ ID NO: 1001) of the analog. In certain embodiments, the acylated or alkylated amino acid is located at position 40 of the analog.

[0622] In exemplary embodiments, the acyl or alkyl group is an acyl or alkyl group which is non-native to a naturally-occurring amino acid. For example, the acyl or alkyl group may be a C4 to C30 (e.g., C12 to C18) fatty acyl group or C4 to C30 (e.g., C12 to C18) alkyl. The acyl or alkyl group may be any of those discussed herein.

[0623] In some embodiments, the acyl or alkyl group is attached directly to the amino acid, e.g., via the side chain of the amino acid. In other embodiments, the acyl or alkyl group is attached to the amino acid via a spacer (e.g., an amino acid, a dipeptide, a tripeptide, a hydrophilic bifunctional spacer, a hydrophobic bifunctional spacer). In certain aspects, the spacer is 3 to 10 atoms in length. In some embodiments, the spacer is an amino acid or dipeptide comprising one or two of 6-aminohexanoic acid, Ala, Pro, Leu, beta-Ala, gamma-Glu (e.g., gamma-Glu-gamma-Glu). In particular aspects, the total length of the spacer is 14 to 28 atoms.

[0624] Also, in exemplary embodiments, the amino acid to which the acyl or alkyl group is attached may be any of those described herein, including, for example, an amino acid of Formula I, II, or III. The amino acid which is acylated or alkylated may be a Lys, for example. Suitable amino acids comprising an acyl or alkyl group, as well as suitable acyl groups, alkyl groups, and spacers are described herein. See, for example, the teachings under the sections entitled Acylation and/or Alkylation as well as LINKAGE OF A-B to an Acyl OR ALKYL Group.

[0625] In other embodiments, 1-6 amino acids (e.g., 1-2, 1-3, 1-4, 1-5 amino acids) of the extension are positive-charged amino acids, e.g., amino acids of Formula IV, such as, for example, Lys. As used herein, the term “positive-charged amino acid” refers to any amino acid, naturally-occurring or non-naturally occurring, comprising a positive charge on an atom of its side chain at a physiological pH. In certain aspects, the positive-charged amino acids are located at any of positions 37, 38, 39, 40, 41, 42, and 43. In specific embodiments, a positive-charged amino acid is located at position 40.

[0626] In other instances, the extension is acylated or alkylated as described herein and comprises 1-6 positive charged amino acids as described herein.

[0627] In yet other embodiments, the analogs which exhibit agonist activity at the GIP receptor comprises (i) SEQ ID NO: 1001 with at least one amino acid modification, (ii) an extension of 1 to 21 amino acids (e.g., 5 to 18, 7 to 15, 9 to 12 amino acids)C-terminal to the amino acid at position 29 of the analog, and (iii) an amino acid comprising an acyl or alkyl group which is non-native to a naturally-occurring amino acid which is located outside of the C-terminal extension (e.g., at any of positions 1-29). In some embodiments, the analog comprises an acylated or alkylated amino acid at position 10. In particular aspects, the acyl or alkyl group is a C4 to C30 fatty acyl or C4 to C30 alkyl group. In some embodiments, the acyl or alkyl group is attached via a spacer, e.g., an amino acid, dipeptide, tripeptide, hydrophilic bifunctional spacer, hydrophobic bifunctional spacer). In certain aspects, the analog comprises an amino acid modification which stabilizes the alpha helix, such as a salt bridge between a Glu at position 16 and a Lys at position 20, or an alpha, alpha-disubstituted amino acid at any one, two, three, or more of positions 16, 20, 21, and 24. In specific aspects, the analog additionally comprises amino acid modifications which confer DPP-IV protease resistance, e.g., DMIA at position 1, AIB at position 2. Analogs comprising further amino acid modifications are contemplated herein.

[0628] In certain embodiments, the analogs having GIP receptor activity exhibit at least 0.1% (e.g., at least 0.5%, 1%, 2%, 5%, 10%, 15%, or 20%) activity of native GIP at the GIP receptor when the analog lacks a hydrophilic moiety, e.g., PEG. In some embodiments, the analogs exhibit more than 10%, (e.g., more than 20%, more than 50%, more than 75%, more than 100%, more than 200%, more than 300%, more than 500%) activity of native GIP at the GIP receptor. In some embodiments, the analog exhibits appreciable agonist activity at one or both of the GLP-1 and glucagon receptors. In some aspects, the potency and/or selectivity for these receptors (GIP receptor and GLP-1 receptor and/or glucagon receptor) are within 1000-fold, 750-fold, 500-fold, 250-fold, or 100-fold (higher or lower). For example, the selectivity for the GLP-1 receptor of the analogs having GIP receptor activity can be less than 1000-fold, 500-fold, 100-fold, within 50-fold, within 25 fold, within 15 fold, within 10 fold) (higher or lower) the selectivity for the GIP receptor and/or the glucagon receptor.

[0629] Further provided herein are analogs of a glucagon peptide with GIP agonist activity, the analog comprising:

(i) The sequence of native glucagon (SEQ ID NO: 1001) with at least one and up to 10 amino acid modifications, wherein at least one of the amino acid modifications confers a stabilized alpha helix structure in the C-terminal portion of the analog;
(ii) an extension of 1 to 21 amino acids C-terminal to the amino acid at position 29, and
(iii) at least one of the following:
(a) at least one of the amino acids of the extension located at any of positions 37-43 (according to the numbering of SEQ ID NO: 1001) comprises an acyl or alkyl group which is non-native to a naturally-occurring amino acid,
(b) the analog comprises an amino acid comprising an acyl or alkyl group, which is non-native to a naturally-occurring amino acid, at position 10 of the analog, or
(c) a combination of (a) and (b);
wherein, when the analog lacks a hydrophilic moiety, the analog exhibits at least 0.1% activity of native GIP at the GIP receptor. Preferably, the amino acid comprising (linked to) a non-native acyl or alkyl group is an amino acid of Formula I, II, or III, for example, Lys. Preferably, the amino acid comprising the non-native acyl or alkyl group is located at any of positions 37, 38, 39, 40, 41, 42 or 43 of the analog.

[0630] Any of the preceding analogs can further comprise (i) an intramolecular bridge between the side chains of an amino acid at position i and an amino acid at position i+4 or between the side chains of amino acids at positions j and j+3, wherein i is 12, 13, 16, 17, 20 or 24 and j is 17, or (ii) one, two, three or more of positions 16, 20, 21 or 24 of the analog are substituted with an α, α-disubstituted amino acid, or (iii) both (i) and (ii). Such an analog may have, at position 1, an amino acid that is not a large aromatic amino acid (e.g. Tyr). For example, the amino acid at position 1 can be an amino acid comprising an imidazole ring, optionally His.

[0631] In some or any embodiments, the analog comprises Glu at position 16 and Lys at position 20, wherein optionally a lactam bridge links the Glu and the Lys, and optionally further comprises one or more of: Gln at position 17, Ala at position 18, Glu at position 21, Ile at position 23, and Ala or Cys at position 24, or one or more conservative amino acid substitutions thereof.

[0632] In some or any embodiments, such analogs can comprise (a) a C-terminal amide, and/or (b) an amino acid substitution at position 1, position 2, or positions 1 and 2, wherein the amino acid substitution(s) achieve DPP-IV protease resistance. In some embodiments, the His at position 1 is substituted with an amino acid selected from the group consisting of: D-histidine, alpha, alpha-dimethyl imidiazole acetic acid (DMIA), N-methyl histidine, alpha-methyl histidine, imidazole acetic acid, desaminohistidine, hydroxyl-histidine, acetyl-histidine and homo-histidine. In some embodiments, the Ser at position 2 is substituted with an amino acid selected from the group consisting of: D-serine, alanine, D-alanine, valine, glycine, N-methyl serine, N-methyl alanine, and amino isobutyric acid (AIB).

[0633] Any of the preceding analogs may comprise further amino acid modifications at one, two or all of positions 27, 28 and 29. For example, (a) the Met at position 27 is substituted with a large aliphatic amino acid, optionally Leu, (b) the Asn at position 28 is substituted with a small aliphatic amino acid, optionally Ala, (c) the Thr at position 29 is substituted with a small aliphatic amino acid, optionally Gly, or (d) a combination of two or all of (a), (b), and (c). In specific exemplary embodiments, such modifications are: Leu at position 27, Ala at position 28, and Gly or Thr at position 29.

[0634] Any of the preceding analogs may comprise one or more of the following modifications:
[0635] a. Ser at position 2 substituted with Ala;
[0636] b. Gln at position 3 substituted with Glu or a glutamine analog;
[0637] c. Thr at position 7 substituted with a Ile;
[0638] d. Tyr at position 10 substituted with Trp or an amino acid comprising an acyl or alkyl group which is non-native to a naturally-occurring amino acid;
[0639] e. Lys at position 12 substituted with Ile;
[0640] f. Asp at position 15 substituted with Glu;
[0641] g. Ser at position 16 substituted with Glu;
[0642] h. Gln at position 20 substituted with Ser, Thr, Ala, AIB;
[0643] i. Gln at position 24 substituted with Ser, Thr, Ala, AIB;
[0644] j. Met at position 27 substituted with Leu or Nle;
[0645] k. Asn at position 29 substituted with a charged amino acid, optionally, Asp or Glu; and
[0646] l. Thr at position 29 substituted with Gly or a charged amino acid, optionally, Asp or Glu.

[0647] Any of the preceding analogs may, in some or any embodiments, comprise (i) the amino acid sequence of GPSSGAPPPS (SEQ ID NO: 26) or XGPSSGAPPPS (SEQ ID NO: 674), wherein X is any amino acid, (ii) an amino acid sequence which has at least 80% sequence identity to SEQ ID NO: 26 or SEQ ID NO: 674, or (iii) the amino acid sequence of (i) or (ii) with one or more conservative amino acid substitutions, wherein the amino acid sequence is C-terminal to the amino acid at position 29 of the analog.

[0648] In any of these embodiments, the acyl group is a C4 to C30 fatty acyl group, or a C12 to C18 fatty acyl group, or a C14 to C16 fatty acyl group, or a bile acid or salt, or a steroid or cholesterol group. The acyl or alkyl group can be covalently attached to the side chain of the amino acid via a spacer, e.g. an amino acid or dipeptide, 6-amino hexanoic acid, a dipeptide selected from the group consisting of: Ala-Ala, β-Ala-β-Ala, Leu-Leu, or Pro-Pro. In some embodiments, the spacer is 3 to 10 atoms in length, or the total length of the spacer and the acyl group is about 14 to about 28 atoms in length.

[0649] In some embodiments, any of the preceding analogs may comprise 1-6 positive-charged amino acids at any of positions 37, 38, 39, 40, 41, 42, and 43 (according to the numbering of SEQ ID NO: 1001) or at the C-terminus. Such positive-charged amino acids include the structure of Formula IV:

[chemical structure]

[0650] wherein n is 1 to 16, or 1 to 10, or 1 to 7, or 1 to 6, or 2 to 6, or 2 or 3 or 4 or 5, each of R₁ and R₂ is independently selected from the group consisting of H, C₁-C₁₈ alkyl, (C₁-C₁₈ alkyl)OH, (C₁-C₁₈ alkyl)NH₂, (C₁-C₁₈ alkyl)SH, (C₀-C₄ alkyl)(C₃-C₆)cycloalkyl, (C₀-C₄ alkyl)(C₂-C₅ heterocyclic), (C₀-C₄ alkyl)(C₆-C₁₀ aryl)R₇, and (C₁-C₄ alkyl)(C₃-C₉ heteroaryl), wherein R₇ is H or OH, and the side chain of the amino acid of Formula IV comprises a free amino group. For example, the amino acid of Formula IV is Orn, Dab, Lys, or homoLys.

[0651] Any of the preceding analogs can be covalently linked to a hydrophilic moiety at any of amino acid positions 19, 20, 23, 24, 27, 32, 40, 43 or the C-terminus. The hydrophilic moiety can be covalently linked to any suitable amino acid at that position, including Lys, Cys, Orn, homocysteine, or acetyl-phenylalanine. Examples of hydrophilic moieties include polyethylene glycol (PEG), e.g. at a molecular weight of about 1,000 Daltons to about 40,000 Daltons, or about 20,000 Daltons to about 40,000 Daltons.

[0652] In some embodiments, the EC50 of the analog for GIP receptor activation is about 10 nM or less when not linked to a hydrophilic moiety. The ratio of the EC50 of the analog at the GLP-1 receptor to the EC50 of the analog at the GIP receptor can be less than about 0.01.

### Class 3 Glucagon Related Peptides

[0653] In certain embodiments, the glucagon related peptide is a Class 3 glucagon related peptide, which is described herein and in International Patent Application No. PCT/US2009/47438 (filed on Jun. 16, 2009), International Patent Application Publication No. WO 2008/101017, published on Aug. 21, 2008, and U.S. Provisional Application No. 61/090,412 and U.S. Application No. 61/177,476, the contents of which are incorporated by reference in their entirety, and in International Patent Application No. PCT/US10/59724 filed 9 Dec. 2010 and U.S. Provisional Application No. 61/288,248, the contents of which are incorporated by reference in their entirety, and in International Patent Application No. PCT/US12/42085 filed 12 Jun. 2012 and U.S. Provisional Application No. 61/500,025, the contents of which are incorporated by reference in their entirety.

[0654] Some of the biological sequences referenced in the following section (SEQ ID NOs: 1-656) relating to Class 3 glucagon related peptides are correspond to SEQ ID NOs: 1-656 in International Patent Application No. PCT/US2009/47438.

[0655] Activity

[0656] The Class 3 glucagon related peptide can be a peptide that exhibits increased activity at the glucagon receptor, and in further embodiments exhibits enhanced biophysical stability and/or aqueous solubility. In addition, in some embodiments, the Class 3 glucagon related peptide has lost native glucagon's selectivity for the glucagon receptor verses the GLP-1 receptor, and thus represents co-agonists of those two receptors. Selected amino acid modifications within the Class 3 glucagon related peptide can control the relative activity of the peptide at the GLP-1 receptor verses the glucagon receptor. Thus, the Class 3 glucagon related peptide can be a glucagon/GLP-1 co-agonist that has higher activity at the glucagon receptor versus the GLP-1 receptor, a glucagon/GLP-1 co-agonist that has approximately equivalent activity at both receptors, or a glucagon/GLP-1 co-agonist that has higher activity at the GLP-1 receptor versus the glucagon receptor. The latter category of co-agonist can be engineered to exhibit little or no activity at the glucagon receptor, and yet retain ability to activate the GLP-1 receptor with the same or better potency than native GLP-1. Any of these co-agonists may also include modifications that confer enhanced biophysical stability and/or aqueous solubility.

[0657] Modifications of the Class 3 glucagon related peptide can be made to produce a glucagon peptide having anywhere from at least about 1% (including at least about 1.5%, 2%, 5%, 7%, 10%, 20%, 30%, 40%, 50%, 60%, 75%, 100%, 125%, 150%, 175%) to about 200% or higher activity at the GLP-1 receptor relative to native GLP-1 and anywhere from at least about 1% (including about 1.5%, 2%, 5%, 7%, 10%, 20%, 30%, 40%, 50%, 60%, 75%, 100%, 125%, 150%, 175%, 200%, 250%, 300%, 350%, 400%, 450%) to about 500% or higher activity at the glucagon receptor relative to native glucagon. The amino acid sequence of native glucagon is SEQ ID NO: 1, the amino acid sequence of GLP-1(7-36)amide is SEQ ID NO: 52, and the amino acid sequence of GLP-1(7-37)acid is SEQ ID NO: 50. In exemplary embodiments, a Class 3 glucagon related peptide may exhibit at least 10% of the activity of native glucagon at the glucagon receptor and at least 50% of the activity of native GLP-1 at the GLP-1 receptor, or at least 40% of the activity of native glucagon at the glucagon receptor and at least 40% of the activity of native GLP-1 at the GLP-1 receptor, or at least 60% of the activity of native glucagon at the glucagon receptor and at least 60% of the activity of native GLP-1 at the GLP-1 receptor.

[0658] Selectivity of a Class 3 glucagon related peptide for the glucagon receptor versus the GLP-1 receptor can be described as the relative ratio of glucagon/GLP-1 activity (the peptide's activity at the glucagon receptor relative to native glucagon, divided by the peptide's activity at the GLP-1 receptor relative to native GLP-1). For example, a Class 3 glucagon related peptide that exhibits 60% of the activity of native glucagon at the glucagon receptor and 60% of the activity of native GLP-1 at the GLP-1 receptor has a 1:1 ratio of glucagon/GLP-1 activity. Exemplary ratios of glucagon/GLP-1 activity include about 1:1, 1.5:1, 2:1, 3:1, 4:1, 5:1, 6:1, 7:1, 8:1, 9:1 or 10:1, or about 1:10, 1:9, 1:8, 1:7, 1:6, 1:5, 1:4, 1:3, 1:2, or 1:1.5. As an example, a glucagon/GLP-1 activity ratio of 10:1 indicates a 10-fold selectivity for the glucagon receptor versus the GLP-1 receptor. Similarly, a GLP-1/glucagon activity ratio of 10:1 indicates a 10-fold selectivity for the GLP-1 receptor versus the glucagon receptor.

[0659] In some embodiments, the Class 3 glucagon related peptides have about 10% or less of the activity of native glucagon at the glucagon receptor, e.g. about 1-10%, or about 0.1-10%, or greater than about 0.1% but less than about 10%, while exhibiting at least 20% of the activity of GLP-1 at the GLP-1 receptor. For example, exemplary Class 3 glucagon related peptides described herein have about 0.5%, about 1% or about 7% of the activity of native glucagon, while exhibiting at least 20% of the activity of GLP-1 at the GLP-1 receptor.

[0660] The Class 3 glucagon related peptide can be a glucagon peptide with increased or decreased activity at the glucagon receptor, or GLP-1 receptor, or both. The Class 3 glucagon related peptide can be a glucagon peptide with altered selectivity for the glucagon receptor versus the GLP-1 receptor.

[0661] Thus, as disclosed herein high potency Class 3 glucagon related peptides are provided that also exhibit improved solubility and/or stability. An exemplary high potency Class 3 glucagon related peptide exhibits at least about 200% of the activity of native glucagon at the glucagon receptor, and optionally is soluble at a concentration of at least 1 mg/mL at a pH between 6 and 8, or between 6 and 9, or between 7 and 9 (e.g. pH 7), and optionally retains at least 95% of the original peptide (e.g. 5% or less of the original peptide is degraded or cleaved) after 24 hours at 25° C. As another example, an exemplary Class 3 glucagon related peptide exhibits greater than about 40% or greater than about 60% activity at both the glucagon and the GLP-1 receptors (at a ratio between about 1:3 and 3:1, or between about 1:2 and 2:1), is optionally soluble at a concentration of at least 1 mg/mL at a pH between 6 and 8 or between 6 and 9, or between 7 and 9 (e.g. pH 7), and optionally retains at least 95% of the original peptide after 24 hours at 25° C. Another exemplary Class 3 glucagon related peptide exhibits about 175% or more of the activity of native glucagon at the glucagon receptor and about 20% or less of the activity of native GLP-1 at the GLP-1 receptor, is optionally soluble at a concentration of at least 1 mg/mL at a pH between 6 and 8 or between 6 and 9, or between 7 and 9 (e.g. pH 7), and optionally retains at least 95% of the original peptide after 24 hours at 25° C. Yet another exemplary Class 3 glucagon related peptide exhibits about 10% or less of the activity of native glucagon at the glucagon receptor and at least about 20% of the activity of native GLP-1 at the GLP-1 receptor, is optionally soluble at a concentration of at least 1 mg/mL at a pH between 6 and 8 or between 6 and 9, or between 7 and 9 (e.g. pH 7), and optionally retains at least 95% of the original peptide after 24 hours at 25° C. Yet another exemplary Class 3 glucagon related peptide exhibits about 10% or less but above 0.1%, 0.5% or 1% of the activity of native glucagon at the glucagon receptor and at least about 50%, 60%, 70%, 80%, 90% or 100% or more of the activity of native GLP-1 at the GLP-1 receptor, is optionally soluble at a concentration of at least 1 mg/mL at a pH between 6 and 8 or between 6 and 9, or between 7 and 9 (e.g. pH 7), and optionally retains at least 95% of the original peptide after 24 hours at 25° C. In some embodiments, such Class 3 glucagon related peptides retain at least 22, 23, 24, 25, 26, 27 or 28 of the naturally occurring amino acids at the corresponding positions in native glucagon (e.g. have 1-7, 1-5 or 1-3 modifications relative to naturally occurring glucagon).

[0662] Modifications Affecting Glucagon Activity

[0663] Increased activity at the glucagon receptor is provided by an amino acid modification at position 16 of native glucagon (SEQ ID NO: 1). In some embodiments, the Class 3 glucagon related peptide is a glucagon agonist that has been modified relative to the wild type peptide of His-Ser-Gln-Gly-Thr-Phe-Thr-Ser-Asp-Tyr-Ser-Lys-Tyr-Leu-Asp-Ser-Arg-Arg-Ala-Gln-Asp-Phe-Val-Gln-Trp-Leu-Met-Asn-Thr (SEQ ID NO: 1) to enhance the peptide's potency at the glucagon receptor. The normally occurring serine at position 16 of native glucagon (SEQ ID NO: 1) can be substituted with select acidic amino acids to enhance the potency of glucagon, in terms of its ability to stimulate cAMP synthesis in a validated in vitro model assay (see Example 5). More particularly, this substitution enhances the potency of the analog at least 2-fold, 4-fold, 5-fold, and up to 10-fold greater at the glucagon receptor. This substitution also enhances the analog's activity at the GLP-1 receptor at least 5-fold, 10-fold, or 15-fold relative to native glucagon, but selectivity is maintained for the glucagon receptor over the GLP-1 receptor.

[0664] By way of nonlimiting example, such enhanced potency can be provided by substituting the naturally occurring serine at position 16 with glutamic acid or with another negatively charged amino acid having a side chain with a length of 4 atoms, or alternatively with any one of glutamine, homoglutamic acid, or homocysteic acid, or a charged amino acid having a side chain containing at least one heteroatom, (e.g. N, O, S, P) and with a side chain length of about 4 (or 3-5) atoms. In accordance with some embodiments, the serine residue at position 16 of native glucagon is substituted with an amino acid selected from the group consisting of glutamic acid, glutamine, homoglutamic acid, homocysteic acid, threonine, or glycine. In accordance with some embodiments, the serine residue at position 16 of native glucagon is substituted with an amino acid selected from the group consisting of glutamic acid, glutamine, homoglutamic acid and homocysteic acid, and in some embodiments the serine residue is substituted with glutamic acid.

[0665] In some embodiments, the enhanced potency Class 3 glucagon related peptide comprises a peptide of SEQ ID NO: 2, SEQ ID NO: 3, SEQ ID NO: 4, SEQ ID NO: 5, SEQ ID NO: 6, SEQ ID NO: 7 or a glucagon agonist analog of SEQ ID NO: 5. In accordance with some embodiments, a Class 3 glucagon related peptide having enhanced potency at the glucagon receptor relative to wild type glucagon is provided wherein the peptide comprises the sequence of SEQ ID NO: 7, SEQ ID NO: 8, SEQ ID NO: 9 or SEQ ID NO: 10, wherein the glucagon peptide retains its selectivity for the glucagon receptor relative to the GLP-1 receptors. In some embodiments, the Class 3 glucagon related peptide having enhanced specificity for the glucagon receptor comprises the peptide of SEQ ID NO: 8, SEQ ID NO: 9, SEQ ID NO: 10 or a glucagon agonist analog thereof, wherein the carboxy terminal amino acid retains its native carboxylic acid group. In accordance with some embodiments, a Class 3 glucagon related peptide comprises the sequence of NH₂—His-Ser-Gln-Gly-Thr-Phe-Thr-Ser-Asp-Tyr-Ser-Lys-Tyr-Leu-Asp-Glu-Arg-Arg-Ala-Gln-Asp-Phe-Val-Gln-Trp-Leu-Met-Asn-Thr-COOH (SEQ ID NO: 10), wherein the peptide exhibits approximately fivefold enhanced potency at the glucagon receptor, relative to native glucagon as measured by the in vitro cAMP assay of Example 5.

[0666] Glucagon receptor activity can be reduced, maintained, or enhanced by an amino acid modification at position 3, e.g. substitution of the naturally occurring glutamine at position 3. In some embodiments, substitution of the amino acid at position 3 with an acidic, basic, or hydrophobic amino acid (glutamic acid, ornithine, norleucine) has been shown to substantially reduce or destroy glucagon receptor activity. The analogs that are substituted with, for example, glutamic acid, ornithine, or norleucine have about 10% or less of the activity of native glucagon at the glucagon receptor, e.g. about 1-10%, or about 0.1-10%, or greater than about 0.1% but less than about 10%, while exhibiting at least 20% of the activity of GLP-1 at the GLP-1 receptor. For example, exemplary analogs described herein have about 0.5%, about 1% or about 7% of the activity of native glucagon, while exhibiting at least 20% of the activity of GLP-1 at the GLP-1 receptor. In particular, any of the Class 3 glucagon related peptides, including glucagon analogs, glucagon agonist analogs, glucagon co-agonists, and glucagon/GLP-1 co-agonist molecules, described herein may be modified to contain a modification at position 3, e.g., Gln substituted with Glu, to produce a peptide with high selectivity, e.g., tenfold selectivity, for the GLP-1 receptor as compared to the selectivity for the glucagon receptor.

[0667] In another embodiment, the naturally occurring glutamine at position 3 of any of the Class 3 glucagon peptides can be substituted with a glutamine analog without a substantial loss of activity at the glucagon receptor, and in some cases, with an enhancement of glucagon receptor activity, as described herein. In specific embodiments, the amino acid at position 3 is substituted with Dab(Ac). For example, glucagon agonists can comprise the amino acid sequence of SEQ ID NO: 595, SEQ ID NO: 601 SEQ ID NO: 603, SEQ ID NO: 604, SEQ ID NO: 605, and SEQ ID NO: 606.

[0668] It was observed that modifications at position 2 (e.g. AIB at position 2) and in some cases modifications at position 1 may reduce glucagon activity. This reduction in glucagon activity can be restored by stabilizing the alpha-helix in the C-terminal portion of glucagon, e.g. through means described herein, for example, through a covalent bond between the side chains of the amino acids at positions “i” and “i+4”, e.g., 12 and 16, 16 and 20, or 20 and 24. In some embodiments, this covalent bond is a lactam bridge between a glutamic acid at position 16 and a lysine at position 20. In some embodiments, this covalent bond is an intramolecular bridge other than a lactam bridge. For example, suitable covalent bonding methods include any one or more of olefin metathesis, lanthionine-based cyclization, disulfide bridge or modified sulfur-containing bridge formation, the use of a, w-diaminoalkane tethers, the formation of metal-atom bridges, and other means of peptide cyclization.

[0669] Modifications Affecting GLP-1 Activity

[0670] Enhanced activity at the GLP-1 receptor is provided by replacing the carboxylic acid of the C-terminal amino acid with a charge-neutral group, such as an amide or ester. In some embodiments, these Class 3 glucagon related peptides comprise a sequence of SEQ ID NO: 20, wherein the carboxy terminal amino acid has an amide group in place of the carboxylic acid group found on the native amino acid. These Class 3 glucagon related peptides have strong activity at both the glucagon and GLP-1 receptors and thus act as co-agonists at both receptors. In accordance with some embodiments, the Class 3 glucagon related peptide is a glucagon and GLP-1 receptor co-agonist, wherein the peptide comprises the sequence of SEQ ID NO: 20, wherein the amino acid at position 28 is Asn or Lys and the amino acid at position 29 is Thr-amide.

[0671] Increased activity at the GLP-1 receptor is provided by modifications that stabilize the alpha helix in the C-terminal portion of glucagon (e.g. around residues 12-29).

[0672] In some embodiments, such modifications permit formation of an intramolecular bridge between the side chains of two amino acids that are separated by three intervening amino acids (i.e., an amino acid at position “i” and an amino acid at position “i+4”, wherein i is any integer between 12 and 25), by two intervening amino acids, i.e., an amino acid at position “j” and an amino acid at position “j+3,” wherein j is any integer between 12 and 27, or by six intervening amino acids, i.e., an amino acid at position “k” and an amino acid at position “k+7,” wherein k is any integer between 12 and 22. In exemplary embodiments, the bridge or linker is about 8 (or about 7-9) atoms in length and forms between side chains of amino acids at positions 12 and 16, or at positions 16 and 20, or at positions 20 and 24, or at positions 24 and 28. The two amino acid side chains can be linked to one another through non-covalent bonds, e.g., hydrogen-bonding, ionic interactions, such as the formation of salt bridges, or by covalent bonds.

[0673] In accordance with some embodiments, the Class 3 glucagon related peptide exhibits glucagon/GLP-1 receptor co-agonist activity and comprises an amino acid sequence selected from the group consisting of SEQ ID NO: 11, 47, 48 and 49. In some embodiments, the side chains are covalently bound to one another, and in some embodiments the two amino acids are bound to one another to form a lactam ring.

[0674] In accordance with some embodiments, the Class 3 glucagon related peptide comprises SEQ ID NO: 45, wherein at least one lactam ring is formed between the side chains of an amino acid pair selected from the group consisting of amino acid pairs 12 and 16, 16 and 20, 20 and 24 or 24 and 28. In some embodiments, the Class 3 glucagon related peptide comprises a glucagon peptide analog of SEQ ID NO: 20, wherein the peptide comprises an intramolecular lactam bridge formed between amino acid positions 12 and 16 or between amino acid positions 16 and 20. In some embodiments, the Class 3 glucagon related peptide comprises the sequence of SEQ ID NO: 20, wherein an intramolecular lactam bridge is formed between amino acid positions 12 and 16, between amino acid positions 16 and 20, or between amino acid positions 20 and 24 and the amino acid at position 29 is glycine, wherein the sequence of SEQ ID NO: 29 is linked to the C-terminal amino acid of SEQ ID NO: 20. In a further embodiment, the amino acid at position 28 is aspartic acid.

[0675] In some specific embodiments, stabilization of the alpha helix structure in the C-terminal portion of the Class 3 glucagon related peptide is achieved through the formation of an intramolecular bridge other than a lactam bridge. For example, suitable covalent bonding methods include any one or more of olefin metathesis, lanthionine-based cyclization, disulfide bridge or modified sulfur-containing bridge formation, the use of α, ω-diaminoalkane tethers, the formation of metal-atom bridges, and other means of peptide cyclization are used to stabilize the alpha helix.

[0676] Furthermore, enhanced activity at the GLP-1 receptor may be achieved by stabilizing the alpha-helix structure in the C-terminal portion of the glucagon peptide (around amino acids 12-29) through purposeful introduction of one or more α, α-disubstituted amino acids at positions that retain the desired activity. Such peptides may be considered herein as a peptide lacking an intramolecular bridge. In some aspects, stabilization of the alpha-helix is accomplished in this manner without introduction of an intramolecular bridge such as a salt bridge or covalent bond. In some embodiments, one, two, three, four or more of positions 16, 17, 18, 19, 20, 21, 24 or 29 of a glucagon peptide is substituted with an α, α-disubstituted amino acid. For example, substitution of position 16 of the Class 3 glucagon related peptide with amino iso-butyric acid (AIB) enhances GLP-1 activity, in the absence of a salt bridge or lactam. In some embodiments, one, two, three or more of positions 16, 20, 21 or 24 are substituted with AIB.

[0677] Enhanced activity at the GLP-1 receptor may be achieved by an amino acid modification at position 20. In some embodiments, the glutamine at position 20 is replaced with another hydrophilic amino acid having a side chain that is either charged or has an ability to hydrogen-bond, and is at least about 5 (or about 4-6) atoms in length, for example, lysine, citrulline, arginine, or ornithine.

[0678] Increased activity at the GLP-1 receptor is demonstrated in Class 3 glucagon related peptides comprising the C-terminal extension of SEQ ID NO: 26. GLP-1 activity in such Class 3 glucagon related peptides comprising SEQ ID NO: 26 can be further increased by modifying the amino acid at position 18, 28 or 29, or at position 18 and 29, as described herein.

[0679] A further modest increase in GLP-1 potency may be achieved by modifying the amino acid at position 10 to be Trp.

[0680] Combinations of the modifications that increase GLP-1 receptor activity may provide higher GLP-1 activity than any of such modifications taken alone. For example, the Class 3 glucagon related peptides can comprise modifications at position 16, at position 20, and at the C-terminal carboxylic acid group, optionally with a covalent bond between the amino acids at positions 16 and 20; can comprise modifications at position 16 and at the C-terminal carboxylic acid group; can comprise modifications at positions 16 and 20, optionally with a covalent bond between the amino acids at positions 16 and 20; or can comprise modifications at position 20 and at the C-terminal carboxylic acid group; optionally with the proviso that the amino acid at position 12 is not Arg; or optionally with the proviso that the amino acid at position 9 is not Glu.

[0681] Modifications Affecting Solubility

[0682] Addition of Hydrophilic Moieties

[0683] The Class 3 glucagon related peptides can be further modified to improve the peptide's solubility and stability in aqueous solutions at physiological pH, while retaining the high biological activity relative to native glucagon. Hydrophilic moieties as discussed herein can be attached to the Class 3 glucagon related peptide as further discussed herein.

[0684] In accordance with some embodiments, introduction of hydrophilic groups at positions 17, 21, and 24 of the Class 3 glucagon related peptide comprising SEQ ID NO: 9 or SEQ ID NO: 10 are anticipated to improve the solubility and stability of the high potency glucagon analog in solutions having a physiological pH. Introduction of such groups also increases duration of action, e.g. as measured by a prolonged half-life in circulation.

[0685] In some embodiments, the Class 3 glucagon related peptide comprises a sequence selected from the group consisting of SEQ ID NO: 11, SEQ ID NO: 12, SEQ ID NO: 13, SEQ ID NO: 14, SEQ ID NO: 15, SEQ ID NO: 16, SEQ ID NO: 17, SEQ ID NO: 18 and SEQ ID NO: 19, wherein the side chain of an amino acid residue at one of position 16, 17, 21 or 24 of said Class 3 glucagon related peptide further comprises a polyethylene glycol chain, having a molecular weight selected from the range of about 500 to about 40,000 Daltons. In some embodiments, the polyethylene glycol chain has a molecular weight selected from the range of about 500 to about 5,000 Daltons. In another embodiment. the polyethylene glycol chain has a molecular weight of about 10,000 to about 20,000 Daltons. In yet other exemplary embodiments the polyethylene glycol chain has a molecular weight of about 20,000 to about 40,000 Daltons.

[0686] Suitable hydrophilic moieties include any water soluble polymers known in the art, including the hydrophilic moieties described herein, homo- or co-polymers of PEG, and a monomethyl-substituted polymer of PEG (mPEG). In accordance with some embodiments the hydrophilic group comprises a polyethylene (PEG) chain. More particularly, in some embodiments, the Class 3 glucagon related peptide comprises the sequence of SEQ ID NO: 6 or SEQ ID NO: 7 wherein a PEG chain is covalently linked to the side chains of amino acids present at positions 21 and 24 of the Class 3 glucagon related peptide and the carboxy terminal amino acid of the Class 3 glucagon related peptide has the carboxylic acid group. In accordance with some embodiments, the polyethylene glycol chain has an average molecular weight selected from the range of about 500 to about 10,000 Daltons.

[0687] In accordance with some embodiments, the pegylated Class 3 glucagon related peptide comprises two or more polyethylene glycol chains covalently bound to the Class 3 glucagon related peptide wherein the total molecular weight of the glucagon chains is about 1,000 to about 5,000 Daltons. In some embodiments the pegylated glucagon agonist comprises a peptide consisting of SEQ ID NO: 5 or a glucagon agonist analog of SEQ ID NO: 5, wherein a PEG chain is covalently linked to the amino acid residue at position 21 and at position 24, and wherein the combined molecular weight of the two PEG chains is about 1,000 to about 5,000 Daltons.

[0688] Charged C-Terminus

[0689] The solubility of the Class 3 glucagon related peptide comprising SEQ ID NO: 20 can be further improved, for example, by introducing one, two, three or more charged amino acid(s) to the C-terminal portion of glucagon peptide of SEQ ID NO: 20, preferably at a position C-terminal to position 27. Such a charged amino acid can be introduced by substituting a native amino acid with a charged amino acid, e.g. at positions 28 or 29, or alternatively by adding a charged amino acid, e.g. after position 27, 28 or 29. In exemplary embodiments, one, two, three or all of the charged amino acids are negatively charged. Additional modifications, e.g. conservative substitutions, may be made to the Class 3 glucagon related peptide that still allow it to retain glucagon activity. In some embodiments, an analog of the Class 3 glucagon related peptide of SEQ ID NO: 20 is provided wherein the analog differs from SEQ ID NO: 20 by 1 to 2 amino acid substitutions at positions 17-26, and, in some embodiments, the analog differs from the peptide of SEQ ID NO: 20 by an amino acid substitution at position 20.

[0690] Acylation/Alkylation

[0691] In accordance with some embodiments, the glucagon peptide is modified to comprise an acyl or alkyl group, e.g., a C4 to C30 acyl or alkyl group. In some aspects, the acyl group or alkyl group is not naturally occurring on an amino acid. In specific aspects, the acyl or alkyl group is non-native to any naturally-occurring amino acid. Acylation or alkylation can increase the half-life in circulation and/or delay the onset of and/or extend the duration of action and/or improve resistance to proteases such as DPP-IV. The activity at the glucagon receptor and GLP-1 receptor of the Class 3 glucagon related peptides is maintained, if not substantially enhanced after acylation Further, the potency of the acylated analogs were comparable to the unacylated versions of the Class 3 glucagon related peptides, if not substantially enhanced.

[0692] In some embodiments, the invention provides a Class 3 glucagon related peptide modified to comprise an acyl group or alkyl group covalently linked to the amino acid at position 10 of the glucagon peptide. The glucagon peptide may further comprise a spacer between the amino acid at position 10 of the Class 3 glucagon related peptide and the acyl group or alkyl group. Any of the foregoing Class 3 glucagon related peptides may comprise two acyl groups or two alkyl groups, or a combination thereof.

[0693] In a specific aspect of the invention, the acylated Class 3 glucagon related peptide comprises the amino acid sequence of any of SEQ ID NOs: 534-544 and 546-549.

[0694] C-Terminal Truncation

[0695] In some embodiments, the Class 3 glucagon related peptides described herein are further modified by truncation or deletion of one or two amino acids of the C-terminus of the glucagon peptide (i.e., position 29 and/or 28) without affecting activity and/or potency at the glucagon and GLP-1 receptors. In this regard, the Class 3 glucagon related peptide can comprise amino acids 1-27 or 1-28 of the native glucagon peptide (SEQ ID NO: 1), optionally with one or more modifications described herein.

[0696] In some embodiments, the truncated Class 3 glucagon related peptide comprises SEQ ID NO: 550 or SEQ ID NO: 551. In another embodiment, the truncated glucagon agonist peptide comprises SEQ ID NO: 552 or SEQ ID NO: 553.

[0697] C-Terminal Extension

[0698] In accordance with some embodiments, the Class 3 glucagon related peptides disclosed herein are modified by the addition of a second peptide to the carboxy terminus of the glucagon peptide, for example, SEQ ID NO: 26, SEQ ID NO: 27 or SEQ ID NO: 28. In some embodiments, a Class 3 glucagon related peptide having a sequence selected from the group consisting of SEQ ID NO: 11, SEQ ID NO: 12, SEQ ID NO: 13, SEQ ID NO: 14, SEQ ID NO: 15, SEQ ID NO: 16, SEQ ID NO: 17, SEQ ID NO: 18, SEQ ID NO: 19, SEQ ID NO: 66, SEQ ID NO: 67, SEQ ID NO: 68, and SEQ ID NO: 69 is covalently bound through a peptide bond to a second peptide, wherein the second peptide comprises a sequence selected from the group consisting of SEQ ID NO: 26, SEQ ID NO: 27 and SEQ ID NO: 28. In a further embodiment, in Class 3 glucagon related peptides which comprise the C-terminal extension, the threonine at position 29 of the native glucagon peptide is replaced with a glycine. A Class 3 glucagon related peptide having a glycine substitution for threonine at position 29 and comprising the carboxy terminal extension of SEQ ID NO: 26 is four times as potent at the GLP-1 receptor as native glucagon modified to comprise the carboxy terminal extension of SEQ ID NO: 26. Potency at the GLP-1 receptor can be further enhanced by an alanine substitution for the native arginine at position 18.

[0699] Accordingly, the Class 3 glucagon related peptide can have a carboxy terminal extension of SEQ ID NO: 27 (KRNRNNIA) or SEQ ID NO: 28. In accordance with some embodiments, Class 3 glucagon related peptide comprising SEQ ID NO: 33 or SEQ ID NO: 20, further comprises the amino acid sequence of SEQ ID NO: 27 (KRNRNNIA) or SEQ ID NO: 28 linked to amino acid 29 of the glucagon peptide. More particularly, the Class 3 glucagon related peptide comprises a sequence selected from the group consisting of SEQ ID NO: 10, SEQ ID NO: 12, SEQ ID NO: 13 SEQ ID NO: 14 and SEQ ID NO: 15, further comprising the amino acid sequence of SEQ ID NO: 27 (KRNRNNIA) or SEQ ID NO: 28 linked to amino acid 29 of the glucagon peptide. More particularly, the glucagon peptide comprises a sequence selected from the group consisting of SEQ ID NO: 10, SEQ ID NO: 12, SEQ ID NO: 13 SEQ ID NO: 14, SEQ ID NO: 15, SEQ ID NO: 16, SEQ ID NO: 17, SEQ ID NO: 18, SEQ ID NO: 66, SEQ ID NO: 67, SEQ ID NO: 68, SEQ ID NO: 69, SEQ ID NO: 55 and SEQ ID NO: 56 further comprising the amino acid sequence of SEQ ID NO: 26 (GPSSGAPPPS) or SEQ ID NO: 29 linked to amino acid 29 of the Class 3 glucagon related peptide. In some embodiments, the Class 3 glucagon related peptide comprises the sequence of SEQ ID NO: 64.

[0700] Other Modifications

[0701] Any of the modifications described above with regard to Class 3 glucagon related peptides which increase or decrease glucagon receptor activity and which increase GLP-1 receptor activity can be applied individually or in combination. Combinations of the modifications that increase GLP-1 receptor activity generally provide higher GLP-1 activity than any of such modifications taken alone. Any of the modifications described above can also be combined with other modifications described herein in reference to Class 3 glucagon related peptides that confer other desirable properties, such as increased solubility and/or stability and/or duration of action. Alternatively, any of the modifications described above can be combined with other modifications described herein in reference to Class 3 glucagon related peptides that do not substantially affect solubility or stability or activity. Exemplary modifications include but are not limited to:

[0702] (A) Improving solubility, for example, by introducing one, two, three or more charged amino acid(s) to the C-terminal portion of native glucagon, preferably at a position C-terminal to position 27. Such a charged amino acid can be introduced by substituting a native amino acid with a charged amino acid, e.g. at positions 28 or 29, or alternatively by adding a charged amino acid, e.g. after position 27, 28 or 29. In exemplary embodiments, one, two, three or all of the charged amino acids are negatively charged. In other embodiments, one, two, three or all of the charged amino acids are positively charged. Such modifications increase solubility, e.g. provide at least 2-fold, 5-fold, 10-fold, 15-fold, 25-fold, 30-fold or greater solubility relative to native glucagon at a given pH between about 5.5 and 8, e.g., pH 7, when measured after 24 hours at 25° C.

[0703] (B) Increasing solubility and duration of action or half-life in circulation by addition of a hydrophilic moiety such as a polyethylene glycol chain, as described herein, e.g. at position 16, 17, 20, 21, 24 or 29, or at the C-terminal amino acid of the peptide.

[0704] (C) Increasing stability by modification of the aspartic acid at position 15, for example, by deletion or substitution with glutamic acid, homoglutamic acid, cysteic acid or homocysteic acid. Such modifications can reduce degradation or cleavage at a pH within the range of 5.5 to 8, especially in acidic or alkaline buffers, for example, retaining at least 75%, 80%, 90%, 95%, 96%, 97%, 98% or 99% of the original peptide after 24 hours at 25° C.

[0705] (D) Increasing stability by modification of the methionine at position 27, for example, by substitution with leucine or norleucine. Such modifications can reduce oxidative degradation. Stability can also be increased by modification of the Gln at position 20 or 24, e.g. by substitution with Ser, Thr, Ala or AIB. Such modifications can reduce degradation that occurs through deamidation of Gln. Stability can be increased by modification of Asp at position 21, e.g. by substitution with Glu. Such modifications can reduce degradation that occurs through dehydration of Asp to form a cyclic succinimide intermediate followed by isomerization to iso-aspartate.

[0706] (E) Increasing resistance to dipeptidyl peptidase IV (DPP IV) cleavage by modification of the amino acid at position 1 or 2 with the DPP-IV resistant amino acids described herein and including modification of the amino acid at position 2 with N-methyl-alanine.

[0707] (F) Conservative or non-conservative substitutions, additions or deletions that do not affect activity, for example, conservative substitutions at one or more of positions 2, 5, 7, 10, 11, 12, 13, 14, 16, 17, 18, 19, 20, 21, 24, 27, 28 or 29; deletions at one or more of positions 27, 28 or 29; or a deletion of amino acid 29 optionally combined with a C-terminal amide or ester in place of the C-terminal carboxylic acid group;

[0708] (G) Adding C-terminal extensions as described herein;

[0709] (H) Increasing half-life in circulation and/or extending the duration of action and/or delaying the onset of action, for example, through acylation or alkylation of the glucagon peptide, as described herein;

[0710] (I) Homodimerization or heterodimerization as described herein.

[0711] Other modifications include substitution of His at position 1 with a large, aromatic amino acid (e.g., Tyr, Phe, Trp or amino-Phe); Ser at position 2 with Ala; substitution of Tyr at position 10 with Val or Phe; substitution of Lys at position 12 with Arg; substitution of Asp at position 15 with Glu; substitution of Ser at position 16 with Thr or AIB.

[0712] Class 3 glucagon related peptides with GLP-1 activity that contain a non-conservative substitution of His at position 1 with a large, aromatic amino acid (e.g., Tyr) can retain GLP-1 activity provided that the alpha-helix is stabilized via an intramolecular bridge, e.g., such as any of those described herein.

[0713] Conjugates and Fusions

[0714] The Class 3 glucagon related peptide can be linked, optionally via covalent bonding and optionally via a linker, to a conjugate moiety.

[0715] The Class 3 glucagon related peptide also can be part of a fusion peptide or protein wherein a second peptide or polypeptide has been fused to a terminus, e.g., the carboxy terminus of the Class 3 glucagon related peptide.

[0716] More particularly, the fusion Class 3 glucagon related peptide may comprise a glucagon agonist of SEQ ID NO: 55, SEQ ID NO: 9 or SEQ ID NO: 10 further comprising an amino acid sequence of SEQ ID NO: 26 (GPSSGAPPPS), SEQ ID NO: 27 (KRNRNNIA) or SEQ ID NO: 28 (KRNR) linked to amino acid 29 of the glucagon peptide. In some embodiments, the amino acid sequence of SEQ ID NO: 26 (GPSSGAPPPS), SEQ ID NO: 27 (KRNRNNIA) or SEQ ID NO: 28 (KRNR) is bound to amino acid 29 of the Class 3 glucagon related peptide through a peptide bond. Applicants have discovered that in Class 3 glucagon related peptide fusion peptides comprising the C-terminal extension peptide of Exendin-4 (e.g., SEQ ID NO: 26 or SEQ ID NO: 29), substitution of the native threonine residue at position 29 with glycine dramatically increases GLP-1 receptor activity. This amino acid substitution can be used in conjunction with other modifications disclosed herein with regard to Class 3 glucagon related peptides to enhance the affinity of the glucagon analogs for the GLP-1 receptor. For example, the T29G substitution can be combined with the S16E and N20K amino acid substitutions, optionally with a lactam bridge between amino acids 16 and 20, and optionally with addition of a PEG chain as described herein. In some embodiments, a Class 3 glucagon related peptide comprises the sequence of SEQ ID NO: 64. In some embodiments, the Class 3 glucagon related peptide portion of the glucagon fusion peptide is selected from the group consisting of SEQ ID NO: 55, SEQ ID NO: 2, SEQ ID NO: 3, SEQ ID NO: 4, and SEQ ID NO: 5 wherein a PEG chain, when present at positions 17, 21, 24, or the C-terminal amino acid, or at both 21 and 24, is selected from the range of 500 to 40,000 Daltons. More particularly, in some embodiments, the Class 3 glucagon related peptide segment is selected from the group consisting of SEQ ID NO: 7, SEQ ID NO: 8, and SEQ ID NO: 63, wherein the PEG chain is selected from the range of 500 to 5,000. In some embodiments, the Class 3 glucagon related peptide is a fusion peptide comprising the sequence of SEQ ID NO: 55 and SEQ ID NO: 65 wherein the peptide of SEQ ID NO: 65 is linked to the carboxy terminus of SEQ ID NO: 55.

[0717] In accordance with some embodiments, an additional chemical modification of the Class 3 glucagon related peptide of SEQ ID NO: 10 bestows increased GLP-1 receptor potency to a point where the relative activity at the glucagon and GLP-1 receptors is virtually equivalent. Accordingly, in some embodiments, a Class 3 glucagon related peptide comprises a terminal amino acid comprising an amide group in place of the carboxylic acid group that is present on the native amino acid. The relative activity of the Class 3 glucagon related peptide at the respective glucagon and GLP-1 receptors can be adjusted by further modifications to the Class 3 glucagon related peptide to produce analogs demonstrating about 40% to about 500% or more of the activity of native glucagon at the glucagon receptor and about 20% to about 200% or more of the activity of native GLP-1 at the GLP-1 receptor, e.g. 50-fold, 100-fold or more increase relative to the normal activity of glucagon at the GLP-1 receptor. In some embodiments, the glucagon peptides described herein exhibit up to about 100%, 1000%, 10,000%, 100,000%, or 1,000,000% of the activity of native glucagon at the glucagon receptor. In some embodiments, the glucagon peptides described herein exhibit up to about 100%, 1000%, 10,000%, 100,000%, or 1,000,000% of the activity of native GLP-1 at the GLP-1 receptor.

### Exemplary Embodiments

[0718] In accordance with some embodiments, a glucagon analog is provided comprising the sequence of SEQ ID NO: 55, wherein said analog differs from SEQ ID NO: 55 by 1 to 3 amino acids, selected from positions 1, 2, 3, 5, 7, 10, 11, 13, 14, 17, 18, 19, 21, 24, 27, 28, and 29, wherein said glucagon peptide exhibits at least 20% of the activity of native GLP-1 at the GLP-1 receptor.

[0719] In accordance with some embodiments a glucagon/GLP-1 receptor co-agonist is provided comprising the sequence:

(SEQ ID NO: 33)

NH₂-His-Ser-Gln-Gly-Thr-Phe-Thr-Ser-Asp-Tyr-Ser-
Lys-Tyr-Leu-Xaa-Xaa-Arg-Arg-Ala-Xaa-Asp-Phe-Val-
Xaa-Trp-Leu-Met-Xaa-Xaa-R

wherein the Xaa at position 15 is selected from the group of amino acids consisting of Asp, Glu, cysteic acid, homoglutamic acid and homocysteic acid, Xaa at position 16 is selected from the group of amino acids consisting of Ser, Glu, Gln, homoglutamic acid and homocysteic acid, the Xaa at position 20 is Gln or Lys, the Xaa at position 24 is Gln or Glu, the Xaa at position 28 is Asn, Lys or an acidic amino acid, the Xaa at position 29 is Thr, Gly or an acidic amino acid, and R is COOH or CONH₂, with the proviso that when position 16 is serine, position 20 is Lys, or alternatively when position 16 is serine the position 24 is Glu and either position 20 or position 28 is Lys. In some embodiments the glucagon/GLP-1 receptor co-agonist comprises the sequence of SEQ ID NO: 33 wherein the amino acid at position 28 is aspartic acid and the amino acid at position 29 is glutamic acid. In another embodiment the amino acid at position 28 is the native asparagine, the amino acid at position 29 is glycine and the amino acid sequence of SEQ ID NO: 29 or SEQ ID NO: 65 is covalently linked to the carboxy terminus of SEQ ID NO: 33.

[0720] In some embodiments a co-agonist is provided comprising the sequence of SEQ ID NO: 33 wherein an additional acidic amino acid added to the carboxy terminus of the peptide. In a further embodiment the carboxy terminal amino acid of the glucagon analog has an amide in place of the carboxylic acid group of the natural amino acid. In some embodiments the glucagon analog comprises a sequence selected from the group consisting of SEQ ID NO: 40, SEQ ID NO: 41, SEQ ID NO: 42, SEQ ID NO: 43 and SEQ ID NO: 44.

[0721] In accordance with some embodiments a glucagon peptide analog of SEQ ID NO: 33 is provided, wherein said analog differs from SEQ ID NO: 33 by 1 to 3 amino acids, selected from positions 1, 2, 3, 5, 7, 10, 11, 13, 14, 17, 18, 19, 21 and 27, with the proviso that when the amino acid at position 16 is serine, either position 20 is lysine, or a lactam bridge is formed between the amino acid at position 24 and either the amino acid at position 20 or position 28. In accordance with some embodiments the analog differs from SEQ ID NO: 33 by 1 to 3 amino acids selected from positions 1, 2, 3, 21 and 27. In some embodiments the glucagon peptide analog of SEQ ID NO: 33 differs from that sequence by 1 to 2 amino acids, or in some embodiments by a single amino acid, selected form positions 1, 2, 3, 5, 7, 10, 11, 13, 14, 17, 18, 19, 21 and 27, with the proviso that when the amino acid at position 16 is serine, either position 20 is lysine, or a lactam bridge is formed between the amino acid at position 24 and either the amino acid at position 20 or position 28.

[0722] In accordance with another embodiment a relatively selective GLP-1 receptor agonist is provided comprising the sequence NH2-His-Ser-Xaa-Gly-Thr-Phe-Thr-Ser-Asp-Tyr-Ser-Lys-Tyr-Leu-Xaa-Xaa-Arg-Arg-Ala-Xaa-Asp-Phe-Val-Xaa-Trp-Leu-Met-Xaa-Xaa-R (SEQ ID NO: 53) wherein the Xaa at position 3 is selected from the group of amino acids consisting of Glu, Orn or Nle, the Xaa at position 15 is selected from the group of amino acids consisting of Asp, Glu, cysteic acid, homoglutamic acid and homocysteic acid, Xaa at position 16 is selected from the group of amino acids consisting of Ser, Glu, Gln, homoglutamic acid and homocysteic acid, the Xaa at position 20 is Gln or Lys, the Xaa at position 24 is Gln or Glu, the Xaa at position 28 is Asn, Lys or an acidic amino acid, the Xaa at position 29 is Thr, Gly or an acidic amino acid, and R is COOH, CONH₂, SEQ ID NO: 26 or SEQ ID NO: 29, with the proviso that when position 16 is serine, position 20 is Lys, or alternatively when position 16 is serine the position 24 is Glu and either position 20 or position 28 is Lys. In some embodiments the amino acid at position 3 is glutamic acid. In some embodiments the acidic amino acid substituted at position 28 and/or 29 is aspartic acid or glutamic acid. In some embodiments the glucagon peptide, including a co-agonist peptide, comprises the sequence of SEQ ID NO: 33 further comprising an additional acidic amino acid added to the carboxy terminus of the peptide. In a further embodiment the carboxy terminal amino acid of the glucagon analog has an amide in place of the carboxylic acid group of the natural amino acid.

[0723] In accordance with some embodiments a glucagon/GLP-1 receptor co-agonist is provided comprising a modified glucagon peptide selected from the group consisting of:

(SEQ ID NO: 34)

NH₂-His-Ser-Gln-Gly-Thr-Phe-Thr-Ser-Asp-Tyr-Ser-
Lys-Tyr-Leu-Xaa-Xaa-Arg-Arg-Ala-Xaa-Asp-Phe-Val-
Xaa-Trp-Leu-Met-Xaa-Xaa-R,

wherein the Xaa at position 15 is selected from the group of amino acids consisting of Asp, Glu, cysteic acid, homoglutamic acid and homocysteic acid, Xaa at position 16 is selected from the group of amino acids consisting of Ser, Glu, Gln, homoglutamic acid and homocysteic acid, the Xaa at position 20 is Gln or Lys, the Xaa at position 24 is Gln or Glu and the Xaa at position 28 is Asn, Asp or Lys, R is COOH or CONH₂, the Xaa at position 29 is Thr or Gly, and R is COOH, CONH₂, SEQ ID NO: 26 or SEQ ID NO: 29, with the proviso that when position 16 is serine, position 20 is Lys, or alternatively when position 16 is serine the position 24 is Glu and either position 20 or position 28 is Lys. In some embodiments R is CONH₂, the Xaa at position 15 is Asp, the Xaa at position 16 is selected from the group of amino acids consisting of Glu, Gln, homoglutamic acid and homocysteic acid, the Xaas at positions 20 and 24 are each Gln the Xaa at position 28 is Asn or Asp and the Xaa at position 29 is Thr. In some embodiments the Xaas at positions 15 and 16 are each Glu, the Xaas at positions 20 and 24 are each Gln, the Xaa at position 28 is Asn or Asp, the Xaa at position 29 is Thr and R is CONH₂.

[0724] It has been reported that certain positions of the native glucagon peptide can be modified while retaining at least some of the activity of the parent peptide. Accordingly, applicants anticipate that one or more of the amino acids located at positions at positions 2, 5, 7, 10, 11, 12, 13, 14, 17, 18, 19, 20, 21, 24, 27, 28 or 29 of the peptide of SEQ ID NO: 11 can be substituted with an amino acid different from that present in the native glucagon peptide, and still retain activity at the glucagon receptor. In some embodiments the methionine residue present at position 27 of the native peptide is changed to leucine or norleucine to prevent oxidative degradation of the peptide. In another embodiment the amino acid at position 20 is substituted with Lys, Arg, Orn or Citrullene and/or position 21 is substituted with Glu, homoglutamic acid or homocysteic acid.

[0725] In some embodiments a glucagon analog of SEQ ID NO: 20 is provided wherein 1 to 6 amino acids, selected from positions 1, 2, 5, 7, 10, 11, 13, 14, 17, 18, 19, 21, 27, 28 or 29 of the analog differ from the corresponding amino acid of SEQ ID NO: 1, with the proviso that when the amino acid at position 16 is serine, position 20 is Lys, or alternatively when position 16 is serine the position 24 is Glu and either position 20 or position 28 is Lys. In accordance with another embodiment a glucagon analog of SEQ ID NO: 20 is provided wherein 1 to 3 amino acids selected from positions 1, 2, 5, 7, 10, 11, 13, 14, 17, 18, 19, 20, 21, 27, 28 or 29 of the analog differ from the corresponding amino acid of SEQ ID NO: 1. In another embodiment, a glucagon analog of SEQ ID NO: 8, SEQ ID NO: 9 or SEQ ID NO: 11 is provided wherein 1 to 2 amino acids selected from positions 1, 2, 5, 7, 10, 11, 13, 14, 17, 18, 19, 20 or 21 of the analog differ from the corresponding amino acid of SEQ ID NO: 1, and in a further embodiment the one to two differing amino acids represent conservative amino acid substitutions relative to the amino acid present in the native glucagon sequence (SEQ ID NO: 1). In some embodiments a glucagon peptide of SEQ ID NO: 12, SEQ ID NO: 13, SEQ ID NO: 14 or SEQ ID NO: 15 is provided wherein the glucagon peptide further comprises one, two or three amino acid substitutions at positions selected from positions 2, 5, 7, 10, 11, 13, 14, 17, 18, 19, 20, 21, 27 or 29. In some embodiments the substitutions at positions 2, 5, 7, 10, 11, 13, 14, 16, 17, 18, 19, 20, 21, 27 or 29 are conservative amino acid substitutions.

[0726] In accordance with some embodiments a glucagon/GLP-1 receptor co-agonist is provided comprising a variant of the sequence of SEQ ID NO 33, wherein 1 to 10 amino acids selected from positions 16, 17, 18, 20, 21, 23, 24, 27, 28 and 29, respectively, of the variant differ from the corresponding amino acid of SEQ ID NO: 1. In accordance with some embodiments a variant of the sequence of SEQ ID NO 33 is provided wherein the variant differs from SEQ ID NO: 33 by one or more amino acid substitutions selected from the group consisting of Gln17, Ala18, Glu21, Ile23, Ala24, Val27 and Gly29. In accordance with some embodiments a glucagon/GLP-1 receptor co-agonist is provided comprising variants of the sequence of SEQ ID NO 33, wherein 1 to 2 amino acids selected from positions 17-26 of the variant differ from the corresponding amino acid of SEQ ID NO: 1. In accordance with some embodiments a variant of the sequence of SEQ ID NO 33 is provided wherein the variant differs from SEQ ID NO: 33 by an amino acid substitution selected from the group consisting of Gln17, Ala18, Glu21, Ile23 and Ala24. In accordance with some embodiments a variant of the sequence of SEQ ID NO 33 is provided wherein the variant differs from SEQ ID NO: 33 by an amino acid substitution at position 18 wherein the substituted amino acid is selected from the group consisting of Ala, Ser, Thr, and Gly. In accordance with some embodiments a variant of the sequence of SEQ ID NO 33 is provided wherein the variant differs from SEQ ID NO: 33 by an amino acid substitution of Ala at position 18. Such variations are encompassed by SEQ ID NO: 55. In another embodiment a glucagon/GLP-1 receptor co-agonist is provided comprising variants of the sequence of SEQ ID NO 33, wherein 1 to 2 amino acids selected from positions 17-22 of the variant differ from the corresponding amino acid of SEQ ID NO: 1, and in a further embodiment a variant of SEQ ID NO 33 is provided wherein the variant differs from SEQ ID NO: 33 by for 2 amino acid substitutions at positions 20 and 21. In accordance with some embodiments a glucagon/GLP-1 receptor co-agonist is provided comprising the sequence:

(SEQ ID NO: 51)

NH2-His-Ser-Gln-Gly-Thr-Phe-Thr-Ser-Asp-Tyr-Ser-
Lys-Tyr-Leu-Xaa-Xaa-Arg-Arg-Ala-Xaa-Xaa-Phe-Val-
Xaa-Trp-Leu-Met-Xaa-Xaa-R,

wherein the

[0727] Xaa at position 15 is Asp, Glu, cysteic acid, homoglutamic acid or homocysteic acid,

[0728] the Xaa at position 16 is Ser, Glu, Gln, homoglutamic acid or homocysteic acid, the

[0729] Xaa at position 20 is Gln, Lys, Arg, Orn or citrulline, the Xaa at position 21 is Asp, Glu, homoglutamic acid or homocysteic acid, the Xaa at position 24 is Gln or Glu, the Xaa at position 28 is Asn, Lys or an acidic amino acid, the Xaa at position 29 is Thr or an acid amino acid and R is COOH or CONH₂. In some embodiments R is CONH₂. In accordance with some embodiments a glucagon/GLP-1 receptor co-agonist is provided comprising a variant of SEQ ID NO: 11, SEQ ID NO: 12, SEQ ID NO: 13, SEQ ID NO: 14, SEQ ID NO: 15, SEQ ID NO: 47, SEQ ID NO: 48 or SEQ ID NO: 49, wherein the variant differs from said sequence by an amino acid substitution at position 20. In some embodiments the amino acid substitution is selected form the group consisting of Lys, Arg, Orn or citrulline for position 20.

[0730] In some embodiments a glucagon agonist is provided comprising an analog peptide of SEQ ID NO: 34 wherein the analog differs from SEQ ID NO: 34 by having an amino acid other than serine at position 2. In some embodiments the serine residue is substituted with aminoisobutyric acid, D-alanine, and in some embodiments the serine residue is substituted with aminoisobutyric acid. Such modifications suppresses cleavage by dipeptidyl peptidase IV while retaining the inherent potency of the parent compound (e.g. at least 75, 80, 85, 90, 95% or more of the potentcy of the parent compound). In some embodiments the solubility of the analog is increased, for example, by introducing one, two, three or more charged amino acid(s) to the C-terminal portion of native glucagon, preferably at a position C-terminal to position 27. In exemplary embodiments, one, two, three or all of the charged amino acids are negatively charged. In another embodiment the analog further comprises an acidic amino acid substituted for the native amino acid at position 28 or 29 or an acidic amino acid added to the carboxy terminus of the peptide of SEQ ID NO: 34.

[0731] In some embodiments the glucagon analogs disclosed herein are further modified at position 1 or 2 to reduce susceptibility to cleavage by dipeptidyl peptidase IV. In some embodiments a glucagon analog of SEQ ID NO: 9, SEQ ID NO: 11, SEQ ID NO: 12, SEQ ID NO: 13, SEQ ID NO: 14 or SEQ ID NO: 15 is provided wherein the analog differs from the parent molecule by a substitution at position 2 and exhibits reduced susceptibility (i.e., resistance) to cleavage by dipeptidyl peptidase IV. More particularly, in some embodiments position 2 of the analog peptide is substituted with an amino acid selected from the group consisting of D-serine, D-alanine, valine, amino n-butyric acid, glycine, N-methyl serine and aminoisobutyric acid. In some embodiments position 2 of the analog peptide is substituted with an amino acid selected from the group consisting of D-serine, D-alanine, glycine, N-methyl serine and aminoisobutyric acid. In another embodiment position 2 of the analog peptide is substituted with an amino acid selected from the group consisting of D-serine, glycine, N-methyl serine and aminoisobutyric acid. In some embodiments the amino acid at position 2 is not D-serine. In some embodiments the glucagon peptide comprises the sequence of SEQ ID NO: 21 or SEQ ID NO: 22.

[0732] In some embodiments a glucagon analog of SEQ ID NO: 9, SEQ ID NO: 11, SEQ ID NO: 12, SEQ ID NO: 13, SEQ ID NO: 14 or SEQ ID NO: 15 is provided wherein the analog differs from the parent molecule by a substitution at position 1 and exhibits reduced susceptibility (i.e., resistance) to cleavage by dipeptidyl peptidase IV. More particularly, position 1 of the analog peptide is substituted with an amino acid selected from the group consisting of D-histidine, alpha, alpha-dimethyl imidiazole acetic acid (DMIA), N-methyl histidine, alpha-methyl histidine, imidazole acetic acid, desaminohistidine, hydroxyl-histidine, acetyl-histidine and homo-histidine. In another embodiment a glucagon agonist is provided comprising an analog peptide of SEQ ID NO: 34 wherein the analog differs from SEQ ID NO: 34 by having an amino acid other than histidine at position 1. In some embodiments the solubility of the analog is increased, for example, by introducing one, two, three or more charged amino acid(s) to the C-terminal portion of native glucagon, preferably at a position C-terminal to position 27. In exemplary embodiments, one, two, three or all of the charged amino acids are negatively charged. In another embodiment the analog further comprises an acidic amino acid substituted for the native amino acid at position 28 or 29 or an acidic amino acid added to the carboxy terminus of the peptide of SEQ ID NO: 34. In some embodiments the acidic amino acid is aspartic acid or glutamic acid.

[0733] In some embodiments the glucagon/GLP-1 receptor co-agonist comprises a sequence of SEQ ID NO: 20 further comprising an additional carboxy terminal extension of one amino acid or a peptide selected from the group consisting of SEQ ID NO: 26, SEQ ID NO: 27 and SEQ ID NO: 28. In the embodiment wherein a single amino acid is added to the carboxy terminus of SEQ ID NO: 20, the amino acid is typically selected from one of the 20 common amino acids, and in some embodiments the additional carboxy terminus amino acid has an amide group in place of the carboxylic acid of the native amino acid. In some embodiments the additional amino acid is selected from the group consisting of glutamic acid, aspartic acid and glycine.

[0734] In an alternative embodiment a glucagon/GLP-1 receptor co-agonist is provided wherein the peptide comprises at least one lactam ring formed between the side chain of a glutamic acid residue and a lysine residue, wherein the glutamic acid residue and a lysine residue are separated by three amino acids. In some embodiments the carboxy terminal amino acid of the lactam bearing glucagon peptide has an amide group in place of the carboxylic acid of the native amino acid. More particularly, in some embodiments a glucagon and GLP-1 co-agonist is provided comprising a modified glucagon peptide selected from the group consisting of:

(SEQ ID NO: 66)

NH₂-His-Ser-Gln-Gly-Thr-Phe- Thr-Ser-Asp-Tyr-Ser-
Lys-Tyr-Leu-Asp-Glu- Arg-Arg-Ala-Gln-Asp-Phe-Val-
Gln-Trp-Leu- Met-Xaa-Xaa-R

(SEQ ID NO: 67)

NH₂-His-Ser-Gln-Gly-Thr-Phe- Thr-Ser-Asp-Tyr-Ser-
Lys-Tyr-Leu-Asp-Glu- Arg-Arg-Ala-Lys-Asp-Phe-Val-
Gln-Trp-Leu- Met-Xaa-Xaa-R

(SEQ ID NO: 68)

NH₂-His-Ser-Gln-Gly-Thr-Phe- Thr-Ser-Asp-Tyr-Ser-
Lys-Tyr-Leu-Asp-Ser- Arg-Arg-Ala-Lys-Asp-Phe-Val-
Glu-Trp-Leu- Met-Xaa-Xaa-R

(SEQ ID NO: 69)

NH₂-His-Ser-Gln-Gly-Thr-Phe- Thr-Ser-Asp-Tyr-Ser-
Lys-Tyr-Leu-Asp-Ser- Arg-Arg-Ala-Gln-Asp-Phe-Val-
Glu-Trp-Leu- Met-Lys-Xaa-R

(SEQ ID NO: 16)

NH₂-His-Ser-Gln-Gly-Thr-Phe- Thr-Ser-Asp-Tyr-Ser-
Lys-Tyr-Leu-Asp-Glu- Arg-Arg-Ala-Lys-Asp-Phe-Val-
Glu-Trp-Leu- Met-Asn-Thr-R

(SEQ ID NO: 17)

NH₂-His-Ser-Gln-Gly-Thr-Phe- Thr-Ser-Asp-Tyr-Ser-
Lys-Tyr-Leu-Asp-Glu- Arg-Arg-Ala-Gln-Asp-Phe-Val-
Glu-Trp-Leu- Met-Lys-Thr-R

(SEQ ID NO: 18)

NH₂-His-Ser-Gln-Gly-Thr-Phe- Thr-Ser-Asp-Tyr-Ser-
Lys-Tyr-Leu-Asp-Glu- Arg-Arg-Ala-Lys-Asp-Phe-Val-
Glu-Trp-Leu- Met-Lys-Thr-R

[0735] wherein Xaa at position 28=Asp, or Asn, the Xaa at position 29 is Thr or Gly, R is selected from the group consisting of COOH, CONH₂, glutamic acid, aspartic acid, glycine, SEQ ID NO: 26, SEQ ID NO: 27 and SEQ ID NO: 28, and a lactam bridge is formed between Lys at position 12 and Glu at position 16 for SEQ ID NO: 66, between Glu at position 16 and Lys at position 20 for SEQ ID NO: 67, between Lys at position 20 and Glu at position 24 for SEQ ID NO: 68, between Glu at position 24 and Lys at position 28 for SEQ ID NO: 69, between Lys at position 12 and Glu at position 16 and between Lys at position 20 and Glu at position 24 for SEQ ID NO: 16, between Lys at position 12 and Glu at position 16 and between Glu at position 24 and Lys at position 28 for SEQ ID NO: 17 and between Glu at position 16 and Lys at position 20 and between Glu at position 24 and Lys at position 28 for SEQ ID NO: 18. In some embodiments R is selected from the group consisting of COOH, CONH₂, glutamic acid, aspartic acid, glycine, the amino acid at position 28 is Asn, and the amino acid at position 29 is threonine. In some embodiments R is CONH₂, the amino acid at position 28 is Asn and the amino acid at position 29 is threonine. In another embodiment R is selected from the group consisting of SEQ ID NO: 26, SEQ ID NO: 29 and SEQ ID NO: 65 and the amino acid at position 29 is glycine.

[0736] In a further embodiment the glucagon/GLP-1 receptor co-agonist is selected from the group consisting of SEQ ID NO: 11, SEQ ID NO: 12, SEQ ID NO: 13, SEQ ID NO: 14, SEQ ID NO: 15, SEQ ID NO: 16, SEQ ID NO: 17 and SEQ ID NO: 18, wherein the peptide further comprises an additional carboxy terminal extension of one amino acid or a peptide selected from the group consisting of SEQ ID NO: 26, SEQ ID NO: 27 and SEQ ID NO: 28. In some embodiments the terminal extension comprises the sequence of SEQ ID NO: 26, SEQ ID NO: 29 or SEQ ID NO: 65 and the glucagon peptide comprises the sequence of SEQ ID NO: 55. In some embodiments the glucagon/GLP-1 receptor co-agonist comprises the sequence of SEQ ID NO: 33 wherein the amino acid at position 16 is glutamic acid, the amino acid at position 20 is lysine, the amino acid at position 28 is asparagine and the amino acid sequence of SEQ ID No: 26 or SEQ ID NO: 29 is linked to the carboxy terminus of SEQ ID NO: 33.

[0737] In the embodiment wherein a single amino acid is added to the carboxy terminus of SEQ ID NO: 20, the amino acid is typically selected from one of the 20 common amino acids, and in some embodiments the amino acid has an amide group in place of the carboxylic acid of the native amino acid. In some embodiments the additional amino acid is selected from the group consisting of glutamic acid and aspartic acid and glycine. In the embodiments wherein the glucagon agonist analog further comprises a carboxy terminal extension, the carboxy terminal amino acid of the extension, in some embodiments, ends in an amide group or an ester group rather than a carboxylic acid.

[0738] In another embodiment the glucagon/GLP-1 receptor co-agonist comprises the sequence: NH₂-His-Ser-Gln-Gly-Thr-Phe-Thr-Ser-Asp-Tyr-Ser-Lys-Tyr-Leu-Asp-Glu-Arg-Arg-Ala-Gln-Asp-Phe-Val-Gln-Trp-Leu-Met-Asn-Thr-Xaa-CONH₂ (SEQ ID NO: 19), wherein the Xaa at position 30 represents any amino acid. In some embodiments Xaa is selected from one of the 20 common amino acids, and in some embodiments the amino acid is glutamic acid, aspartic acid or glycine. The solubility of this peptide can be further improved by covalently linking a PEG chain to the side chain of amino acid at position 17, 21, 24 or 30 of SEQ ID NO: 19. In a further embodiment the peptide comprises an additional carboxy terminal extension of a peptide selected from the group consisting of SEQ ID NO: 26, SEQ ID NO: 27 and SEQ ID NO: 28. In accordance with some embodiments the glucagon/GLP-1 receptor co-agonist comprises the sequence of SEQ ID NO: 30, SEQ ID NO: 31 and SEQ ID NO: 32.

[0739] Additional site specific modifications internal to the glucagon sequence of SEQ ID NO: 11, SEQ ID NO: 12, SEQ ID NO: 13, SEQ ID NO: 14, SEQ ID NO: 15, SEQ ID NO: 16, SEQ ID NO: 17, SEQ ID NO: 18, SEQ ID NO: 19 and SEQ ID NO: 64 can be made to yield a set of glucagon agonists that possess variable degrees of GLP-1 agonism. Accordingly, peptides that possess virtually identical in vitro potency at each receptor have been prepared and characterized. Similarly, peptides with tenfold selectively enhanced potency at each of the two receptors have been identified and characterized. As noted above substitution of the serine residue at position 16 with glutamic acid enhances the potency of native glucagon at both the Glucagon and GLP-1 receptors, but maintains approximately a tenfold selectivity for the glucagon receptor. In addition by substituting the native glutamine at position 3 with glutamic acid (SEQ ID NO: 22) generates a glucagon analog that exhibits approximately a tenfold selectivity for the GLP-1 receptor.

[0740] The solubility of the glucagon/GLP-1 co-agonist peptides can be further enhanced in aqueous solutions at physiological pH, while retaining the high biological activity relative to native glucagon by the introduction of hydrophilic groups at positions 16, 17, 21, and 24 of the peptide, or by the addition of a single modified amino acid (i.e., an amino acid modified to comprise a hydrophilic group) at the carboxy terminus of the glucagon/GLP-1 co-agonist peptide. In accordance with some embodiments the hydrophilic group comprises a polyethylene (PEG) chain. More particularly, in some embodiments the glucagon peptide comprises the sequence of SEQ ID NO: 10, SEQ ID NO: 11, SEQ ID NO: 12, SEQ ID NO: 13, SEQ ID NO: 14, SEQ ID NO: 15, SEQ ID NO: 16, SEQ ID NO: 17 or SEQ ID NO: 18 wherein a PEG chain is covalently linked to the side chain of an amino acids at position 16, 17, 21, 24, 29 or the C-terminal amino acid of the glucagon peptide, with the proviso that when the peptide comprises SEQ ID NO: 10, SEQ ID NO: 11, SEQ ID NO: 12 or SEQ ID NO: 13 the polyethylene glycol chain is covalently bound to an amino acid residue at position 17, 21 or 24, when the peptide comprises SEQ ID NO: 14 or SEQ ID NO: 15 the polyethylene glycol chain is covalently bound to an amino acid residue at position 16, 17 or 21, and when the peptide comprises SEQ ID NO: 16, SEQ ID NO: 17 or SEQ ID NO: 18 the polyethylene glycol chain is covalently bound to an amino acid residue at position 17 or 21.

[0741] In some embodiments the glucagon peptide comprises the sequence of SEQ ID NO: 11, SEQ ID NO: 12 or SEQ ID NO: 13, wherein a PEG chain is covalently linked to the side chain of an amino acids at position 17, 21, 24, or the C-terminal amino acid of the glucagon peptide, and the carboxy terminal amino acid of the peptide has an amide group in place of the carboxylic acid group of the native amino acid. In some embodiments the glucagon/GLP-1 receptor co-agonist peptide comprises a sequence selected from the group consisting of SEQ ID NO: 12, SEQ ID NO: 13, SEQ ID NO: 14, SEQ ID NO: 15, SEQ ID NO: 16, SEQ ID NO: 17, SEQ ID NO: 18 and SEQ ID NO: 19, wherein a PEG chain is covalently linked to the side chain of an amino acid at position 17, 21 or 24 of SEQ ID NO: 12, SEQ ID NO: 13 and SEQ ID NO: 19, or at position 16, 17 or 21 of SEQ ID NO: 14 and SEQ ID NO: 15 or at position 17 or 21 of SEQ ID NO: 16, SEQ ID NO: 17 and SEQ ID NO: 18 of the glucagon peptide. In another embodiment the glucagon/GLP-1 receptor co-agonist peptide comprises the sequence of SEQ ID NO: 11 or SEQ ID NO: 19, wherein a PEG chain is covalently linked to the side chain of an amino acids at position 17, 21 or 24 or the C-terminal amino acid of the glucagon peptide.

[0742] In accordance with some embodiments, and subject to the proviso limitations described in the preceding paragraphs, the glucagon co-agonist peptide is modified to contain one or more amino acid substitution at positions 16, 17, 21, 24, or 29 or the C-terminal amino acid, wherein the native amino acid is substituted with an amino acid having a side chain suitable for crosslinking with hydrophilic moieties, including for example, PEG. The native peptide can be substituted with a naturally occurring amino acid or a synthetic (non-naturally occurring) amino acid. Synthetic or non-naturally occurring amino acids refer to amino acids that do not naturally occur in vivo but which, nevertheless, can be incorporated into the peptide structures described herein. Alternatively, the amino acid having a side chain suitable for crosslinking with hydrophilic moieties, including for example, PEG, can be added to the carboxy terminus of any of the glucagon analogs disclosed herein. In accordance with some embodiments an amino acid substitution is made in the glucagon/GLP-1 receptor co-agonist peptide at a position selected from the group consisting of 16, 17, 21, 24, or 29 replacing the native amino acid with an amino acid selected from the group consisting of lysine, cysteine, ornithine, homocysteine and acetyl phenylalanine, wherein the substituting amino acid further comprises a PEG chain covalently bound to the side chain of the amino acid. In some embodiments a glucagon peptide selected form the group consisting of SEQ ID NO: 12, SEQ ID NO: 13, SEQ ID NO: 14, SEQ ID NO: 15, SEQ ID NO: 16, SEQ ID NO: 17, SEQ ID NO: 18, and SEQ ID NO: 19 is further modified to comprise a PEG chain is covalently linked to the side chain of an amino acid at position 17 or 21 of the glucagon peptide. In some embodiments the pegylated glucagon/GLP-1 receptor co-agonist further comprises the sequence of SEQ ID NO: 26, SEQ ID NO: 27 or SEQ ID NO: 29.

[0743] In another embodiment the glucagon peptide comprises the sequence of SEQ ID NO: 55 or SEQ ID NO: 56, further comprising a C-terminal extension of SEQ ID NO: 26, SEQ ID NO: 29 or SEQ ID NO: 65 linked to the C-terminal amino acid of SEQ ID NO: 55 or SEQ ID NO: 56, and optionally further comprising a PEG chain covalently linked to the side chain of an amino acids at position 17, 18, 21, 24 or 29 or the C-terminal amino acid of the peptide. In another embodiment the glucagon peptide comprises the sequence of SEQ ID NO: 55 or SEQ ID NO: 56, wherein a PEG chain is covalently linked to the side chain of an amino acids at position 21 or 24 of the glucagon peptide and the peptide further comprises a C-terminal extension of SEQ ID NO: 26, or SEQ ID NO: 29.

[0744] In another embodiment the glucagon peptide comprises the sequence of SEQ ID NO: 55, or SEQ ID NO: 33 or SEQ ID NO: 34, wherein an additional amino acid is added to the carboxy terminus of SEQ ID NO: 33 or SEQ ID NO: 34, and a PEG chain is covalently linked to the side chain of the added amino acid. In a further embodiment, the pegylated glucagon analog further comprises a C-terminal extension of SEQ ID NO: 26 or SEQ ID NO: 29 linked to the C-terminal amino acid of SEQ ID NO: 33 or SEQ ID NO: 34. In another embodiment the glucagon peptide comprises the sequence of SEQ ID NO: 19, wherein a PEG chain is covalently linked to the side chain of the amino acid at position 30 of the glucagon peptide and the peptide further comprises a C-terminal extension of SEQ ID NO: 26 or SEQ ID NO: 29 linked to the C-terminal amino acid of SEQ ID NO: 19.

[0745] The polyethylene glycol chain may be in the form of a straight chain or it may be branched. In accordance with some embodiments the polyethylene glycol chain has an average molecular weight selected from the range of about 500 to about 10,000 Daltons. In some embodiments the polyethylene glycol chain has an average molecular weight selected from the range of about 1,000 to about 5,000 Daltons. In an alternative embodiment the polyethylene glycol chain has an average molecular weight selected from the range of about 10,000 to about 20,000 Daltons. In accordance with some embodiments the pegylated glucagon peptide comprises two or more polyethylene glycol chains covalently bound to the glucagon peptide wherein the total molecular weight of the glucagon chains is about 1,000 to about 5,000 Daltons. In some embodiments the pegylated glucagon agonist comprises a peptide consisting of SEQ ID NO: 5 or a glucagon agonist analog of SEQ ID NO: 5, wherein a PEG chain is covalently linked to the amino acid residue at position 21 and at position 24, and wherein the combined molecular weight of the two PEG chains is about 1,000 to about 5,000 Daltons.

[0746] In certain exemplary embodiments, the glucagon peptide comprises the amino acid sequence of SEQ ID NO: 1 with up to ten amino acid modifications and comprises an amino acid at position 10 which is acylated or alkylated. In some embodiments, the amino acid at position 10 is acylated or alkylated with a C4 to C30 fatty acid. In certain aspects, the amino acid at position 10 comprises an acyl group or an alkyl group which is non-native to a naturally-occurring amino acid.

[0747] In certain embodiments, the glucagon peptide comprising an amino acid at position 10 which is acylated or alkylated comprises a stabilized alpha helix. Accordingly, in certain aspects, the glucagon peptide comprises an acyl or alkyl group as described herein and an intramolecular bridge, e.g., a covalent intramolecular bridge (e.g., a lactam bridge) between the side chains of an amino acid at position i and an amino acid at position i+4, wherein i is 12, 16, 20, or 24. Alternatively or additionally, the glucagon peptide comprises an acyl or alkyl group as described herein and one, two, three or more of positions 16, 20, 21 and/or 24 of the glucagon peptide are substituted with an α, α-disubstituted amino acid, e.g., AIB. In some instances, the non-native glucagon peptide comprises Glu at position 16 and Lys at position 20, wherein optionally a lactam bridge lnkes the Glu and the Lys, and, optionally, the glucagon peptide further comprises one or more modifications selected from the group consisting of: Gln at position 17, Ala at position 18, Glu at position 21, Ile at position 23, and Ala at position 24.

[0748] Also, in any of the embodiments, wherein the glucagon peptide comprises an amino acid at position 10 which is acylated or alkylated, the glucagon peptide can further comprise a C-terminal amide in lieu of the C-terminal alpha carboxylate.

[0749] In some embodiments, the glucagon peptide comprising an acyl or alkyl group as described herein further comprises an amino acid substitution at position 1, at position 2, or at positions 1 and 2, wherein the amino acid substitution(s) achieve DPP-IV protease resistance. For example, the His at position 1 may be substituted with an amino acid selected from the group consisting of: D-histidine, alpha, alpha-dimethyl imidiazole acetic acid (DMIA), N-methyl histidine, alpha-methyl histidine, imidazole acetic acid, desaminohistidine, hydroxyl-histidine, acetyl-histidine and homo-histidine. Alternatively or additionally, the Ser at position 2 may be substituted with an amino acid selected from the group consisting of: D-serine, alanine, D-alanine, valine, glycine, N-methyl serine, N-methyl alanine, and amino isobutyric acid. In some embodiments the amino acid at position 2 is not D-serine.

[0750] The glucagon peptide comprising the amino acid at position 10 which is acylated or alkylated as described herein can comprise any amino acid sequence which is substantially related to SEQ ID NO: 1. For instance, the glucagon peptide comprises SEQ ID NO: 1 with up to 10 amino acid modifications (e.g., 0, 1, 2, 3, 4, 5, 6, 7, 8, 9, 10 modifications). In certain embodiments, the amino acid sequence of the acylated or alkylated glucagon peptide is greater than 25% identical to SEQ ID NO: 1 (e.g., greater than 30%, 35%, 40%, 50%, 60%, 70% 75%, 80%, 85%, 90%, 95%, 96%, 97%, 98%, 99%, or nearly 100% identical to SEQ ID NO: 1). In certain specific embodiments, the glucagon peptide is one which comprises SEQ ID NOs: 55 with an amino acid at position 10 acylated or alkylated as described herein. The glucagon peptide can be any of SEQ ID NOs: 55, 55 with 1 or 2 amino acid modifications, 2-4, 9-18, 20, 23-25, 33, 40-44, 53, 56, 61, 62, 64, 66-514, and 534.

[0751] The acyl or alkyl group of these embodiments may be any acyl or alkyl group described herein. For example, the acyl group may be a C4 to C30 (e.g., C8 to C24) fatty acyl group and the alkyl group may be a C4 to C30 (e.g., C8 to C24) alkyl group.

[0752] The amino acid to which the acyl or alkyl group is attached may be any of the amino acids described herein, e.g., an amino acid of any of Formula I (e.g., Lys), Formula II, and Formula III.

[0753] In some embodiments, the acyl group or alkyl group is directly attached to the amino acid at position 10. In some embodiments, the acyl or alkyl group is attached to the amino acid at position 10 via a spacer, such as, for example, a spacer which is 3 to 10 atoms in length, e.g., an amino acid or dipeptide. Suitable spacers for purposes of attaching an acyl or alkyl group are described herein.

[0754] In accordance with some embodiments, the Class 3 glucagon related peptide may be an analog of any of the foregoing Class 3 glucagon related peptides as described herein, which analog exhibits agonist activity at the GIP receptor. The activity level of the analog at the glucagon receptor, the GLP-1 receptor, and the GIP receptor, the potency at each of these receptors, and the selectivity for each of these receptors may be in accordance with the teachings of Class 2 glucagon related peptides described herein. See, the teachings under the subsection of the Class 2 glucagon related peptide section entitled “Activity.”

[0755] In some embodiments of the invention, an analog of a glucagon peptide, which analog exhibits agonist activity at the GIP receptor, is provided. The analog in certain embodiments comprises the amino acid sequence of SEQ ID NO: 1 with at least one amino acid modification (optionally, up to 15 amino acid modifications), and an extension of 1 to 21 amino acids C-terminal to the amino acid at position 29 of the analog.

[0756] In certain aspects, the analogs comprise at least one amino acid modification and up to 15 amino acid modifications (e.g., 1, 2, 3, 4, 5, 6, 7, 8, 9, 10, 11, 12, 13, 14, 15 amino acid modifications, up to 10 amino acid modifications). In certain embodiments, the analogs comprise at least one amino acid modification at up to 10 amino acid modifications and additional conservative amino acid modifications. Conservative amino acid modifications are described herein.

[0757] In some aspects, at least one of the amino acid modifications confers a stabilized alpha helix structure in the C-terminal portion of the analog. Modifications which achieve a stabilized alpha helix structure are described herein. See, for example, the teachings under the section entitled Stabilization of the alpha helix/Intramolecular bridges. In some aspects, the analog comprises an intramolecular bridge (e.g., a covalent intramolecular bridge, a non-covalent intramolecular bridge) between the side chains of two amino acids of the analog. In certain aspects, an intramolecular bridge links the side chains of the amino acids at positions i and i+4, wherein i is 12, 13, 16, 17, 20, or 24. In other aspects, an intramolecular bridge connects the side chains of the amino acids at positions j and j+3, wherein j is 17, or at positions k and k+7″ wherein k is any integer between 12 and 22. In certain embodiments, the intramolecular bridge is a covalent intramolecular bridge, e.g., a lactam bridge. In specific aspects, the lactam bridge connects the side chains of the amino acids at positions 16 and 20. In particular aspects, one of the amino acids at positions 16 and 20 is a positive-charged amino acid and the other is a negative-charged amino acid. For example, the analog can comprise a lactam bridge connecting the side chains of a Glu at position 16 and a Lys at position 20. In other aspects, the negative-charged amino acid and the positive-charged amino acid form a salt bridge. In this instance, the intramolecular bridge is a non-covalent intramolecular bridge.

[0758] In particular aspects, the amino acid modification which confers a stabilized alpha helix is an insertion or substitution of an amino acid of SEQ ID NO: 1 with an α,α-disubstituted amino acid. Suitable α,α-disubstituted amino acids for purposes of stabilizing the alpha helix are described herein and include, for example, AIB. In some aspects, one, two, three, or more of the amino acids at positions 16, 20, 21, and 24 of SEQ ID NO: 1 are substituted with an α,α-disubstituted amino acid, e.g., AIB. In particular embodiments, the amino acid at position 16 is AIB.

[0759] The analog which exhibits agonist activity at the GIP receptor can comprise additional modifications, such as any of those described herein. For instance, the amino acid modifications may increase or decrease activity at one or both of the GLP-1 receptor and glucagon receptor. The amino acid modifications may increase stability of the peptide, e.g., increase resistance to DPP-IV protease degradation, stabilize the bond between amino acids 15 and 16. The amino acid modifications may increase the solubility of the peptide and/or alter the time of action of the analog at any of the GIP, glucagon, and GLP-1 receptors. A combination of any of these types of modifications may be present in the analogs which exhibit agonist activity at the GIP receptor.

[0760] Accordingly, in some aspects, the analog comprises the amino acid sequence of SEQ ID NO: 1 with one or more of: Gln at position 17, Ala at position 18, Glu at position 21, Ile at position 23, and Ala or Cys at position 24, or conservative amino acid substitutions thereof. In some aspects, the analog comprises a C-terminal amide in place of the C-terminal alpha carboxylate. In certain embodiments, the analog comprises an amino acid substitution at position 1, position 2, or positions 1 and 2, which substitution(s) achieve DPP-IV protease resistance. Suitable amino acid substitutions are described herein. For example, DMIA at position 1 and/or d-Ser or AIB at position 2. In some embodiments, the amino acid at position 2 is not D-serine.

[0761] Additionally or alternatively, the analog may comprise one or a combination of: (a) Ser at position 2 substituted with Ala; (b) Gln at position 3 substituted with Glu or a glutamine analog; (c) Thr at position 7 substituted with a Ile; (d) Tyr at position 10 substituted with Trp or an amino acid comprising an acyl or alkyl group which is non-native to a naturally-occurring amino acid; (e) Lys at position 12 substituted with Ile; (f) Asp at position 15 substituted with Glu; (g) Ser at position 16 substituted with Glu; (h) Gln at position 20 substituted with Ser, Thr, Ala, AIB; (i) Gln at position 24 substituted with Ser, Thr, Ala, AIB; (j) Met at position 27 substituted with Leu or Nle; (k) Asn at position 29 substituted with a charged amino acid, optionally, Asp or Glu; and (1) Thr at position 29 substituted with Gly or a charged amino acid, optionally, Asp or Glu.

[0762] In certain aspects, the analog does not comprise an amino acid modification at position 1 which modification confers GIP agonist activity. In some aspects, the amino acid at position 1 is not a large, aromatic amino acid, e.g., Tyr. In some embodiments, the amino acid at position 1 is an amino acid comprising an imidazole ring, e.g., His, analogs of His. In certain embodiments, the analog is not any of the compounds disclosed in U.S. Patent Application No. 61/151,349. In certain aspects, the analog comprises the amino acid sequence of any of SEQ ID NOs: 657-669.

[0763] With regard to the analogs which exhibit agonist activity at the GIP receptor, the analog comprises an extension of 1-21 amino acids (e.g., 5-19, 7-15, 9-12 amino acids). The extension of the analog may comprise any amino acid sequence, provided that the extension is 1 to 21 amino acids. In some aspects, the extension is 7 to 15 amino acids and in other aspects, the extension is 9 to 12 amino acids. In some embodiments, the extension comprises (i) the amino acid sequence of SEQ ID NO: 26 or 674, (ii) an amino acid sequence which has high sequence identity (e.g., at least 80%, 85%, 90%, 95%, 98%, 99%) with the amino acid sequence of SEQ ID NO: 26 or 674, or (iii) the amino acid sequence of (i) or (ii) with one or more conservative amino acid modifications.

[0764] In some embodiments, at least one of the amino acids of the extension is acylated or alkylated. The amino acid comprising the acyl or alkyl group may be located at any position of extension of the analog. In certain embodiments, the acylated or alkylated amino acid of the extension is located at one of positions 37, 38, 39, 40, 41, or 42 (according to the numbering of SEQ ID NO: 1) of the analog. In certain embodiments, the acylated or alkylated amino acid is located at position 40 of the analog.

[0765] In exemplary embodiments, the acyl or alkyl group is an acyl or alkyl group which is non-native to a naturally-occurring amino acid. For example, the acyl or alkyl group may be a C4 to C30 (e.g., C12 to C18) fatty acyl group or C4 to C30 (e.g., C12 to C18) alkyl. The acyl or alkyl group may be any of those discussed herein.

[0766] In some embodiments, the acyl or alkyl group is attached directly to the amino acid, e.g., via the side chain of the amino acid. In other embodiments, the acyl or alkyl group is attached to the amino acid via a spacer (e.g., an amino acid, a dipeptide, a tripeptide, a hydrophilic bifunctional spacer, a hydrophobic bifunctional spacer). In certain aspects, the spacer is 3 to 10 atoms in length. In some embodiments, the amino acid spacer is not γ-Glu. In some embodiments, the dipeptide spacer is not γ-Glu-γ-Glu.

[0767] Also, in exemplary embodiments, the amino acid to which the acyl or alkyl group is attached may be any of those described herein, including, for example, an amino acid of Formula I, II, or III. The amino acid which is acylated or alkylated may be a Lys, for example. Suitable amino acids comprising an acyl or alkyl group, as well as suitable acyl groups and alkyl groups, are described herein. See, for example, the teachings under the sections entitled Acylation and Alkylation.

[0768] In other embodiments, 1-6 amino acids (e.g., 1-2, 1-3, 1-4, 1-5 amino acids) of the extension are positive-charged amino acids, e.g., amino acids of Formula IV, such as, for example, Lys. As used herein, the term “positive-charged amino acid” refers to any amino acid, naturally-occurring or non-naturally occurring, comprising a positive charge on an atom of its side chain at a physiological pH. In certain aspects, the positive-charged amino acids are located at any of positions 37, 38, 39, 40, 41, 42, and 43. In specific embodiments, a positive-charged amino acid is located at position 40.

[0769] In other instances, the extension is acylated or alkylated as described herein and comprises 1-6 positive charged amino acids as described herein.

[0770] In yet other embodiments, the analogs which exhibit agonist activity at the GIP receptor comprises (i) SEQ ID NO: 1 with at least one amino acid modification, (ii) an extension of 1 to 21 amino acids (e.g., 5 to 18, 7 to 15, 9 to 12 amino acids)C-terminal to the amino acid at position 29 of the analog, and (iii) an amino acid comprising an acyl or alkyl group which is non-native to a naturally-occurring amino acid which is located outside of the C-terminal extension (e.g., at any of positions 1-29). In some embodiments, the analog comprises an acylated or alkylated amino acid at position 10. In particular aspects, the acyl or alkyl group is a C4 to C30 fatty acyl or C4 to C30 alkyl group. In some embodiments, the acyl or alkyl group is attached via a spacer, e.g., an amino acid, dipeptide, tripeptide, hydrophilic bifunctional spacer, hydrophobic bifunctional spacer). In certain aspects, the analog comprises an amino acid modification which stabilizes the alpha helix, such as a salt bridge between a Glu at position 16 and a Lys at position 20, or an alpha, alpha-disubstituted amino acid at any one, two, three, or more of positions 16, 20, 21, and 24. In specific aspects, the analog additionally comprises amino acid modifications which confer DPP-IV protease resistance, e.g., DMIA at position 1, AIB at position 2. Analogs comprising further amino acid modifications are contemplated herein.

[0771] In certain embodiments, the analogs having GIP receptor activity exhibit at least 0.1% (e.g., at least 0.5%, 1%, 2%, 5%, 10%, 15%, or 20%) activity of native GIP at the GIP receptor. In some embodiments, the analogs exhibit more than 20% (e.g., more than 50%, more than 75%, more than 100%, more than 200%, more than 300%, more than 500%) activity of native GIP at the GIP receptor. In some embodiments, the analog exhibits appreciable agonist activity at one or both of the GLP-1 and glucagon receptors. In some aspects, the selectivity for these receptors (GIP receptor and GLP-1 receptor and/or glucagon receptor) are within 1000-fold. For example, the selectivity for the GLP-1 receptor of the analogs having GIP receptor activity can be less than 500-fold, 100-fold, within 50-fold, within 25 fold, within 15 fold, within 10 fold) the selectivity for the GIP receptor and/or the glucagon receptor.

[0772] In particular aspects, the analog comprises the structures of any of SEQ ID NOs: 657-669.

[0773] In accordance with some embodiments, the Class 3 glucagon related peptide comprises the amino acid sequence of native glucagon (SEQ ID NO: 1) comprising the following modifications: AIB at position 2, Glu at position 3, Lys at position 10, Glu at position 16, Gln at position 17, Ala at position 18, Lys at position 20, Glu at position 21, Ile at position 23, Ala at position 24; wherein Lys at position 10 is acylated with a C14 or C16 fatty acid, and wherein the C-terminal carboxylate is replaced with an amide. In a specific embodiment, this Class 3 glucagon related peptide is attached via its N-terminal amino acid to the dipeptide D-Lys-Sarcosine.

[0774] In accordance with some embodiments, the Class 3 glucagon related peptide comprises, consists essentially of, or consists of an amino acid sequence of any of SEQ ID NOs: 70-514, 517-534, or 554, optionally with up to 1, 2, 3, 4, or 5 further modifications that retain GLP-1 agonist and/or glucagon agonist activity. In certain embodiments, the Class 3 glucagon related peptide comprises the amino acids of any of SEQ ID NOs: 562-684, and 1701-1776. In some embodiments, the Class 3 glucagon related peptide comprises the amino acid sequences of any of SEQ ID NOs: 1801-1908.

### Class 4 Glucagon Related Peptides

[0775] In certain embodiments, a glucagon related peptide is a Class 4 glucagon related peptide (see, e.g., International (PCT) Patent Application No. PCT/US2008/080973, incorporated herein by reference in its entirety).

[0776] All biological sequences referenced in the following section (SEQ ID NOs: 1301-1371) correspond to SEQ ID NOs: 1-71 in International Patent Application No. PCT/US2008/080973.

[0777] Activity

[0778] In accordance with some embodiments, Class 4 glucagon related peptides are provided (hereafter referred to as “Class 4 peptides”). In certain aspects a Class 4 peptide is provided which has glucagon antagonist activity. A glucagon antagonists would be used in any setting where the suppression of glucagon agonism is desired. The most immediate and obvious use would be in the treatment of diabetes where glucagon antagonism has been demonstrated in pre-clinical models of hyperglycemia to yield a lowering of blood glucose. Glucagon antagonists can be further modified to improve the biophysical stability and/or aqueous solubility of the compounds while maintaining the antagonist activity of the parent compound. In certain aspects a Class 4 peptide is defined as a pure glucagon antagonist.

[0779] The term “glucagon antagonist” refers to a compound that counteracts glucagon activity or prevents glucagon function. For example, a glucagon antagonist exhibits at least 60% inhibition (e.g., at least 70% inhibition) and preferably, at least 80% inhibition, of the maximum response achieved by glucagon at the glucagon receptor. In some embodiments, the glucagon antagonist exhibits at least 90% inhibition of the maximum response achieved by glucagon at the glucagon receptor. In a specific embodiment, the glucagon antagonist exhibits 100% inhibition of the maximum response achieved by glucagon at the glucagon receptor. Additionally, a glucagon antagonist at a concentration of about 1 μM exhibits less than about 20% of the maximum agonist activity achieved by glucagon at the glucagon receptor. In some embodiments, the glucagon antagonist exhibits less than about 10% of the maximum agonist activity achieved by glucagon at the glucagon receptor. In a specific embodiment, the glucagon antagonist exhibits less than about 5% of the maximum agonist activity achieved by glucagon at the glucagon receptor. In yet another specific embodiment, the glucagon antagonist exhibits 0% of the maximum agonist activity achieved by glucagon at the glucagon receptor.

[0780] A “pure glucagon antagonist” is a glucagon antagonist that does not produce any detected stimulation of glucagon or GLP-1 receptor activity, as measured by cAMP production using a validated in vitro model assay (see, e.g., PCT/US2008/080973). For example, a pure glucagon antagonist exhibits less than about 5% (e.g., less than about 4%, less than about 3%, less than about 2%, less than about 1%, about 0%) of the maximum agonist activity achieved by glucagon at the glucagon receptor and exhibits less than about 5% (e.g., less than about 4%, less than about 3%, less than about 2%, less than about 1%, and about 0%) of the maximum agonist activity achieved by GLP-1 at the GLP-1 receptor.

[0781] Accordingly, in some aspects, there is provided Class 4 peptides that exhibit pure glucagon antagonist activity. In accordance with some embodiments the glucagon antagonist exhibits activity that reduces glucagon receptor glucagon-induced cAMP production by a maximum of at least 50% when the glucagon receptor is contacted simultaneously with 0.8 nM of glucagon and the glucagon antagonist, as measured by cAMP production in an in vitro assay. In some embodiments, the glucagon antagonist reduces glucagon receptor glucagon-induced cAMP production by a maximum amount of at least 80%.

[0782] Class 4 peptides are believed to be suitable for any use that has previously been described for glucagon antagonists. Accordingly, the Class 4 peptides described herein can be used to treat hyperglycemia, or treat other metabolic diseases that result from high blood levels of glucagon or high blood glucose levels. In accordance with some embodiments the patient to be treated using the Class 4 peptides disclosed herein is a domesticated animal, and in another embodiment the patient to be treated is a human. Studies suggest that lack of glucagon suppression in diabetic patients contributes to postprandial hyperglycemia in part via accelerated glycogenolysis. Analysis of blood glucose during an Oral Glucose Tolerance Test (OGTT), and in the presence or absence of somatostatin-induced glucagon suppression, has shown a significant increase in glucose in subjects with higher glucagon levels. Accordingly, the Class 4 peptides of the present invention can be used to treat hyperglycemia, and are expected to be useful for treating a variety of types of diabetes including diabetes mellitus type I, diabetes mellitus type II, or gestational diabetes, either insulin-dependent or non-insulin-dependent, and reducing complications of diabetes including nephropathy, retinopathy and vascular disease.

[0783] In some embodiments the terminal ten amino acids of Exendin-4 (i.e. the sequence of SEQ ID NO: 1319 (GPSSGAPPPS)) are linked to the carboxy terminus of a Class 4 peptide. These fusion proteins are anticipated to have pharmacological activity for suppressing appetite and inducing weight loss/weight maintenance. In accordance with some embodiments the Class 4 peptides disclosed herein can be further modified to include the amino acid sequence of SEQ ID NO: 1319 (GPSSGAPPPS) linked to amino acid 24 of the Class 4 peptide of SEQ ID NO: 1342 and administered to individuals to induce weight loss or assist in weight maintenance. More particularly, the Class 4 peptide comprises a sequence selected from the group consisting of SEQ ID NO: 1302, SEQ ID NO: 1303, SEQ ID NO: 1304 SEQ ID NO: 1305, SEQ ID NO: 1306, SEQ ID NO: 1307, SEQ ID NO: 1308, SEQ ID NO: 1336, SEQ ID NO: 1339, SEQ ID NO: 1340 SEQ ID NO: 1341, SEQ ID NO: 1342, SEQ ID NO: 1343 and SEQ ID NO: 1344 and further comprising the amino acid sequence of SEQ ID NO: 1319 (GPSSGAPPPS) linked to amino acid 24 of the Class 4 peptide is used to suppress appetite and inducing weight loss/weight maintenance. In some embodiments the administered Class 4 peptide comprises the sequence of SEQ ID NO: 1346 or SEQ ID NO: 1347.

[0784] Such methods for reducing appetite or promoting loss of body weight are expected to be useful in reducing body weight, preventing weight gain, or treating obesity of various causes, including drug-induced obesity, and reducing complications associated with obesity including vascular disease (coronary artery disease, stroke, peripheral vascular disease, ischemia reperfusion, etc.), hypertension, onset of diabetes type II, hyperlipidemia and musculoskeletal diseases.

[0785] The Class 4 peptides of the invention may be administered alone or in combination with other anti-diabetic or anti-obesity agents. Anti-diabetic agents known in the art or under investigation include insulin, sulfonylureas, such as tolbutamide (Orinase), acetohexamide (Dymelor), tolazamide (Tolinase), chlorpropamide (Diabinese), glipizide (Glucotrol), glyburide (Diabeta, Micronase, Glynase), glimepiride (Amaryl), or gliclazide (Diamicron); meglitinides, such as repaglinide (Prandin) or nateglinide (Starlix); biguanides such as metformin (Glucophage) or phenformin; thiazolidinediones such as rosiglitazone (Avandia), pioglitazone (Actos), or troglitazone (Rezulin), or other PPARγ inhibitors; alpha glucosidase inhibitors that inhibit carbohydrate digestion, such as miglitol (Glyset), acarbose (Precose/Glucobay); exenatide (Byetta) or pramlintide; Dipeptidyl peptidase-4 (DPP-4) inhibitors such as vildagliptin or sitagliptin; SGLT (sodium-dependent glucose transporter 1) inhibitors; or FBPase (fructose 1,6-bisphosphatase) inhibitors.

[0786] Anti-obesity agents known in the art or under investigation include appetite suppressants, including phenethylamine type stimulants, phentermine (optionally with fenfluramine or dexfenfluramine), diethylpropion (Tenuate®), phendimetrazine (Prelu-2®, Bontril®), benzphetamine (Didrex®), sibutramine (Meridia®, Reductil®); rimonabant (Acomplia®), other cannabinoid receptor antagonists; oxyntomodulin; fluoxetine hydrochloride (Prozac); Qnexa (topiramate and phentermine), Excalia (bupropion and zonisamide) or Contrave (bupropion and naltrexone); or lipase inhibitors, similar to xenical (Orlistat) or Cetilistat (also known as ATL-962), or GT 389-255.

[0787] The Class 4 peptides of the present invention can also be administered to patients suffering from catabolic wasting. It is estimated that over half of cancer patients experience catabolic wasting which is characterized by unintended and progressive weight loss, weakness, and low body fat and muscle. The syndrome is equally common in AIDS patients and can also be present in bacterial and parasitic diseases, rheumatoid arthritis, and chronic diseases of the bowel, liver, lungs, and heart. It is usually associated with anorexia and can manifest as a condition in aging or as a result of physical trauma. Catabolic wasting is a symptom that diminishes the quality of life, worsens the underlying condition, and is a major cause of death. Applicants anticipate that the Class 4 peptides disclosed herein can be administered to patients to treat catabolic wasting.

[0788] Pharmaceutical compositions comprising the Class 4 peptides disclosed herein can be formulated and administered to patients to using standard pharmaeuctically acceptable carriers and routes of administration known to those skilled in the art. Accordingly the present disclosure also encompasses pharmaceutical compositions comprising one or more of the Class 4 peptides disclosed herein in combination with a pharmaceutically acceptable carrier. The pharmaceutical compositions may comprise the Class 4 peptides as the sole pharmaceutically active component, or the Class 4 peptides can be combined with one or more additional active agents. In accordance with some embodiments a composition is provided comprising a Class 4 peptide of the present invention and a compound that activates the GLP-1 receptor (such as GLP-1, a GLP-1 analog, an exendin-4 analog, or derivatives thereof). In accordance with some embodiments a composition is provided comprising a Class 4 peptide of the present invention and insulin or an insulin analog. Alternatively, a composition provided for inducing weight loss or preventing weight gain can be provided that comprises the sequence of SEQ ID NO: 1342 further comprising the amino acid sequence of SEQ ID NO: 1319 (GPSSGAPPPS) linked to amino acid 24 of SEQ ID NO: 1342, and an anti-obesity peptide. Suitable anti-obesity peptides include those disclosed in U.S. Pat. Nos. 5,691,309, 6,436,435 or US Patent application 20050176643, and including, but not limited to GLP-1, GIP (Gastric Inhibitory Polypeptide), MP1, PYY, MC-4, Leptin.

[0789] Class 4 Peptide Structure

[0790] In some embodiments Class 4 glucagon related peptides are provided wherein the normally occurring aspartic acid at position nine (of glucagon, SEQ ID NO: 1301) has been substituted with glutamic acid or a cysteic acid-based derivative. More particularly, deletion of the first amino acid (des-His) and substitution of the aspartic acid at position 9 with glutamic acid, in some aspects, produces a Class 4 peptide. Class 4 glucagon related peptides having sulfonic acid substituents substituted at amino acid position nine of glucagon perform similarly to the carboxylic acid-based amino acids but with a few critical differences in relation to physical properties such as solubility. Homocysteic acid (hCysSO₃) when substituted for the isosteric glutamic acid at position nine in the conventional des-His, Glu9 Class 4 peptide retains a partial antagonist and weak agonist.

[0791] In some embodiments there is provided a Class 4 peptide wherein the first two to five amino acids are removed, and position 9 (according to the numbering of SEQ ID NO: 1301) is replaced with hCys(SO₃), homoglutamic acid, β-homoglutamic acid, or an alkylcarboxylate derivative of cysteine having the structure of:

[chemical structure]

[0792] wherein X₅ is C₁-C₄ alkyl, C₂-C₄ alkenyl, or C₂-C₄ alkynyl, provides a compound that performs as a hormonal antagonist that is highly specific, potent and without contaminating agonist properties.

[0793] In accordance with some embodiments a Class 4 peptide is provided that comprises a glucagon peptide modified, relative to the wild type sequence of SEQ ID NO: 1301, by the deletion of two to five amino acid residues from the N-terminus and substitution of the aspartic acid residue at position nine of the native protein with a glutamic acid, homoglutamic acid, β-homoglutamic acid, a sulfonic acid derivative of cysteine, or an alkylcarboxylate derivative of cysteine having the structure of:

[chemical structure]

[0794] wherein X₅ is C₁-C₄ alkyl, C₂-C₄ alkenyl, or C₂-C₄ alkynyl.

[0795] In one specific embodiment, the Class 4 peptide comprising the deletion of two to five amino acid residues from the N-terminus and substitution of the Asp at position 9 of the native glucagon, is further modified by up to three amino acid modifications. For example, the Class 4 peptide may comprise one, two, or three conservative amino acid modifications. Alternatively or additionally, the Class 4 peptide may comprise one or more amino acid modifications selected from the group consisting of:

[0796] A. substitution of one or two amino acids at positions 10, 20, and 24, (according to the amino acid numbering of SEQ ID NO: 1301), or the N- or C-terminal amino acid of the Class 4 peptide with an amino acid covalently attached to an acyl group or alkyl group via an ester, ether, thioether, amide, or alkyl amine linkage;

[0797] B. substitution of one or two amino acids at positions 16, 17, 20, 21, and 24 (according to the amino acid numbering of SEQ ID NO: 1301), or the N- or C-terminal amino acid of the Class 4 peptide with an amino acid selected from the group consisting of: Cys, Lys, ornithine, homocysteine, and acetyl-phenylalanine (Ac-Phe), wherein the amino acid of the group is covalently bonded to a hydrophilic moiety;

[0798] C. addition of an amino acid covalently bonded to a hydrophilic moiety to the N- or C-terminus of the Class 4 peptide;

[0799] D. substitution of Asp at position 15 (according to the numbering of SEQ ID NO: 1301) with cysteic acid, glutamic acid, homoglutamic acid, and homocysteic acid;

[0800] E. substitution of Ser at position 16 (according to the numbering of SEQ ID NO: 1301) with cysteic acid, glutamic acid, homoglutamic acid, and homocysteic acid;

[0801] F. substitution with AIB at one or more of positions 16, 20, 21, and 24 according to the amino acid numbering of SEQ ID NO: 1301;

[0802] G. deletion of the amino acid at position 29 or the amino acids at positions 28 and 29, according to the numbering of SEQ ID NO: 1301;

[0803] H. substitution of each or both of the Asn at position 28 and the Thr at position 29 (according to the amino acid numbering of SEQ ID NO: 1301) with charged amino acids; and/or addition of one to two charged amino acids at the C-terminus of SEQ ID NO: 1301;

[0804] I. substitution of the Met at position 27 (according to the numbering of SEQ ID NO: 1301) with Leu or norleucine;

[0805] J. addition of a peptide having the amino acid sequence of any of SEQ ID NOs: 19-21 and 53 to the C-terminus of SEQ ID NO: 1301; wherein Thr at position 29 (according to the numbering of SEQ ID NO: 1301) is Thr or Gly; and

[0806] K. replacement of the C-terminal carboxylate with an amide or ester.

[0807] In a specific embodiment, the Class 4 peptide comprises an amino acid modification of A, B, or C, as described above, or a combination thereof. In yet another specific embodiment, the Class 4 peptide further comprises an amino acid modification of any of D to K as described above, or a combination thereof, in addition to the amino acid modification(s) of A, B, and/or C.

[0808] In some embodiments the Class 4 peptide comprises a glucagon peptide, wherein the first 5 amino acids have been removed from the N-terminus, and the remaining N-terminal amino group has been replaced with a hydroxyl group (the “PLA6 analog”), producing the peptide of SEQ ID NO: 1339. Applicants have found that substitution of phenyl-lactic acid for phenylalanine in Class 4 peptide analogs that have the first five amino acids deleted and substitution of a glutamic acid at position 9 (relative to native glucagon) further enhances the potency of those Class 4 peptide analogs.

[0809] In some embodiments the Class 4 peptide peptide of SEQ ID NO: 1339 is further modified by substituting the aspartic acid residue at position four (position 9 of the native glucagon) with an amino acid of the general structure:

[chemical structure]

[0810] wherein X₆ is C₁-C₃ alkyl, C₂-C₃ alkene or C₂-C₃ alkynyl, and in some embodiments X₆ is C₁-C₃ alkyl, and in another embodiment X₆ is C₂ alkyl. In some embodiments the Class 4 peptide comprises a glucagon peptide, wherein the first 5 amino acids have been removed from the N-terminus, and the aspartic acid residue at position four (position 9 of the native glucagon) has been substituted with cysteic acid or homocysteic acid. In some embodiments the Class 4 peptide comprises a glucagon peptide comprising an amino acid sequence selected from the group consisting of SEQ ID NO: 1339, SEQ ID NO: 1307 and SEQ ID NO: 1308. In some embodiments the Class 4 peptide comprises an amino acid sequence selected from the group consisting of SEQ ID NO: 1308, wherein the amino acid at position four is homocysteic acid.

[0811] In another embodiment, the Class 4 peptide of SEQ ID NO: 1339 is further modified by substituting the aspartic acid residue at position four (position 9 of the native glucagon) with glutamic acid, homoglutamic acid, β-homoglutamic acid, or an alkylcarboxylate derivative of cysteine having the structure of:

[chemical structure]

[0812] wherein X₅ is C₁-C₄ alkyl, C₂-C₄ alkenyl, or C₂-C₄ alkynyl. In a specific embodiment, X₅ is C₁ or C₂ alkyl.

[0813] However, applicants have discovered that with the substitution of the N-terminal phenylalanine with PLA in a des1-5 glucagon analog (i.e., a glucagon analog having the first five amino acids deleted), further substitution of the native aspartic acid residue at position four (position 9 of the native glucagon) is not required to produce an analog that exhibits pure antagonism. This result is surprising in light of the prior art teachings that the native aspartic acid residue at position four must substituted to produce high affinity and potent antagonists of glucagon (2-29) analogs. The use of the PLA substitution improves the relative potency of the Asp9 analog to a point comparable to that of the Glu9 and hCys(SO₃H)9 analogs.

[0814] Substitution of the phenylalanine residue with other phenylalanine analogs, including 3,4-2F-phenylalnine (3,4-2F-Phe), 2-naphthyalanine (2-Nal), N-acyl-phenylalanine (Ac-Phe), alpha-methylhydrocinnamic acid (MCA) and benzylmalonic acid (BMA) did not perform as potently as the PLA substitution.

[0815] Substituting PLA at sites other than at position six (according to the amino acid numbering of native glucagon), including at positions 4 and 5 reveals that the PLA6 analog is an appreciably more potent antagonist than glucagon analogs having a slightly extended N-terminus. The present invention also includes analogs wherein the N-terminal amino group is substituted with an acylated and alkylated “O-terminal” peptides.

[0816] Furthermore, the PLA6 substitution not only increases the potency of the antagonist but also serves a critical role in pegylation. The PLA6 analogs can be selectively pegylated without restoration of glucagon agonism. In the absence of the PLA substitution, pegylation of the analog surprisingly induces glucagon agonism. This glucagon agonism is not seen in the pegylated PLA6 analogs. Several sites for pegylation were investigated including positions 3, 6 and 19 (positions 8, 11 and 19 of native glucagon) and at the N-terminal amino acid residue. In some embodiments the pegylation is at position 19 (position 24 of native glucagon) as that site exhibits the most potent and selective glucagon antagonism.

[0817] In some embodiments, the Class 4 peptide comprises the general structure of A-B-C, wherein A is selected from the group consisting of:

[0818] (i) phenyl lactic acid (PLA);

[0819] (ii) an oxy derivative of PLA;

[0820] (iii) a peptide of 2 to 6 amino acids in which two consecutive amino acids of the peptide are linked via an ester or ether bond;

[0821] B represents amino acids i to 26 of SEQ ID NO: 1301, wherein i is 3, 4, 5, 6, or 7, optionally comprising one or more amino acid modifications selected from the group consisting of:

[0822] (iv) Asp at position 9 (according to the amino acid numbering of SEQ ID NO: 1301) is substituted with a Glu, a sulfonic acid derivative of Cys, homoglutamic acid, β-homoglutamic acid, or an alkylcarboxylate derivative of cysteine having the structure of:

[chemical structure]

[0823] wherein X₅ is C₁-C₄ alkyl, C₂-C₄ alkenyl, or C₂-C₄ alkynyl.

[0824] (v) substitution of one or two amino acids at positions 10, 20, and 24, (according to the amino acid numbering of SEQ ID NO: 1301) with an amino acid covalently attached to an acyl or alkyl group via an ester, ether, thioether, amide, or alkyl amine linkage;

[0825] (vi) substitution of one or two amino acids at positions 16, 17, 20, 21, and 24 (according to the amino acid numbering of SEQ ID NO: 1301) with an amino acid selected from the group consisting of: Cys, Lys, ornithine, homocysteine, and acetyl-phenylalanine (Ac-Phe), wherein the amino acid of the group is covalently attached to a hydrophilic moiety;

[0826] (vii) Asp at position 15 (according to the numbering of SEQ ID NO: 1301) is substituted with cysteic acid, glutamic acid, homoglutamic acid, and homocysteic acid;

[0827] (viii) Ser at position 16 (according to the numbering of SEQ ID NO: 1301) is substituted with cysteic acid, glutamic acid, homoglutamic acid, and homocysteic acid;

[0828] (ix) substitution with AIB at one or more of positions 16, 20, 21, and 24 according to the amino acid numbering of SEQ ID NO: 1301;
[0829] and C is selected from the group consisting of:

[0830] (x) X;

[0831] (xi) X-Y;

[0832] (xii) X-Y-Z; and

[0833] (xiii) X-Y-Z-R10,

[0834] wherein X is Met, Leu, or Nle; Y is Asn or a charged amino acid; Z is Thr, Gly, Cys, Lys, ornithine (Orn), homocysteine, acetyl phenylalanine (Ac-Phe), or a charged amino acid; wherein R10 is selected from a group consisting of SEQ ID NOs: 1319-1321 and 1353; and

[0835] (xiv) any of (x) to (xiii) in which the C-terminal carboxylate is replaced with an amide.

[0836] In a specific aspect, the Class 4 peptide comprises an oxy derivative of PLA. As used herein “oxy derivative of PLA” refers to a compound comprising a modified structure of PLA in which the hydroxyl group has been replaced with O—R₁₁, wherein R₁₁ is a chemical moiety. In this regard, the oxy derivative of PLA can be, for example, an ester of PLA or an ether of PLA.

[0837] Methods of making oxy derivatives of PLA are known in the art. For example, when the oxy derivative is an ester of PLA, the ester may be formed by upon reaction of the hydroxyl of PLA with a carbonyl bearing a nucleophile. The nucleophile can be any suitable nucleophile, including, but not limited to an amine or hydroxyl. Accordingly, the ester of PLA can comprise the structure of Formula IV:

[chemical structure]

[0838] wherein R7 is an ester formed upon reaction of the hydroxyl of PLA with a carbonyl bearing a nucleophile.

[0839] The carbonyl bearing a nucleophile (which reacts with the hydroxyl of PLA to form an ester) can be, for example, a carboxylic acid, a carboxylic acid derivative, or an activated ester of a carboxylic acid. The carboxylic acid derivative can be, but is not limited to, an acyl chloride, an acid anhydride, an amide, an ester, or a nitrile. The activated ester of a carboxylic acid can be, for example, N-hydroxysuccinimide (NHS), tosylate (Tos), a carbodiimide, or a hexafluorophosphate. In some embodiments, the carbodiimide is 1,3-dicyclohexylcarbodiimide (DCC), 1,1′-carbonyldiimidazole (CDI), 1-ethyl-3-(3-dimethylaminopropyl)carbodiimide hydrochloride (EDC), or 1,3-diisopropylcarbodiimide (DICD). In some embodiments, the hexafluorophosphate is selected from a group consisting of hexafluorophosphate benzotriazol-1-yl-oxy-tris(dimethylamino)phosphonium hexafluorophosphate (BOP), benzotriazol-1-yl-oxytripyrrolidinophosphonium hexafluorophosphate (PyBOP), 2-(1H-7-azabenzotriazol-1-yl)-1,1,3,3-tetramethyl uronium hexafluorophosphate (HATU), and o-benzotriazole-N,N,N′,N′-tetramethyl-uronium-hexafluoro-phosphate (HBTU).

[0840] Methods of making ethers from reaction with a hydroxyl group (e.g., the hydroxyl of PLA) also are known in the art. For example, the hydroxyl group of PLA may be reacted with a halogenated alkyl or tosylated alkyl alcohol to form an ether bond.

[0841] Generally, the chemical moiety of R₁₁ is one which does not decrease the activity of the Class 4 peptide. In some embodiments, the chemical moiety enhances the activity, stability, and/or solubility of the Class 4 peptide.

[0842] In a specific embodiment, the chemical moiety bound to PLA via an oxygen-containing bond (e.g., via an ester or ether bond) is a polymer (e.g., a polyalkylene glycol), a carbohydrate, an amino acid, a peptide, or a lipid, e.g., a fatty acid or a steroid.

[0843] In a specific embodiment, the chemical moiety is an amino acid, which, optionally, is a part of a peptide, such that Formula IV is a depsipeptide. In this regard, PLA may be at a position other than the N-terminal amino acid residue of the Class 4 peptide, such that the Class 4 peptide comprises one or more (e.g., 1, 2, 3, 4, 5, 6, or more) amino acids N-terminal to the PLA residue. For example, the Class 4 peptide can comprise PLA at position n, wherein n is 2, 3, 4, 5, or 6 of the Class 4 peptide.

[0844] The amino acids N-terminal to the PLA residue may be synthetic or naturally-occurring. In a specific embodiment, the amino acids which are N-terminal PLA are naturally-occurring amino acids. In some embodiments, the amino acids which are N-terminal to PLA are the N-terminal amino acids of native glucagon. For example, the Class 4 peptide can comprise at the N-terminus the amino acid sequence of any of SEQ ID NOs: 1354-1358, wherein PLA is linked to threonine via an ester bond:

SEQ ID NO: 1354

His-Ser-Gln-Gly-Thr-PLA

SEQ ID NO: 1355

Ser-Gln-Gly-Thr-PLA

SEQ ID NO: 1356

Gln-Gly-Thr-PLA

SEQ ID NO: 1357

Gly-Thr-PLA

SEQ ID NO: 1358

Thr-PLA

[0845] In an alternative embodiment, one or more of the N-terminal amino acids may be substituted with an amino acid other than the amino acid of native glucagon. For example, when the Class 4 peptide comprises PLA as the amino acid at position 5 or 6, the amino acid at position 1 and/or position 2 may be an amino acid which reduces susceptibility to cleavage by dipeptidyl peptidase IV. More particularly, in some embodiments, position 1 of the Class 4 peptide is an amino acid selected from the group consisting of D-histidine, alpha, alpha-dimethyl imidiazole acetic acid (DMIA), N-methyl histidine, alpha-methyl histidine, imidazole acetic acid, desaminohistidine, hydroxyl-histidine, acetyl-histidine and homo-histidine. More particularly, in some embodiments, position 2 of the antagonist peptide is an amino acid selected from the group consisting of D-serine, D-alanine, valine, glycine, N-methyl serine, N-methyl alanine, and aminoisobutyric acid (AIB). Also, for example, when the Class 4 peptide comprises PLA as the amino acid at position 4, 5, or 6, the amino acid at position 3 of the Class 4 peptide may be glutamic acid, as opposed to the native glutamine residue of native glucagon. In an exemplary embodiment of the invention, the Class 4 peptide comprises at the N-terminus the amino acid sequence of any of SEQ ID NOs: 1359-1361.

[0846] With respect to the Class 4 peptides comprising a compound of Formula IV, the polymer may be any polymer, provided that it can react with the hydroxyl group of PLA. The polymer may be one that naturally or normally comprises a carbonyl bearing a nucleophile. Alternatively, the polymer may be one which was derivatized to comprise the carbonyl bearing the carbonyl. The polymer may be a derivatized polymer of any of: polyamides, polycarbonates, polyalkylenes and derivatives thereof including, polyalkylene glycols, polyalkylene oxides, polyalkylene terepthalates, polymers of acrylic and methacrylic esters, including poly(methyl methacrylate), poly(ethyl methacrylate), poly(butylmethacrylate), poly(isobutyl methacrylate), poly(hexylmethacrylate), poly(isodecyl methacrylate), poly(lauryl methacrylate), poly(phenyl methacrylate), poly(methyl acrylate), poly(isopropyl acrylate), poly(isobutyl acrylate), and poly(octadecyl acrylate), polyvinyl polymers including polyvinyl alcohols, polyvinyl ethers, polyvinyl esters, polyvinyl halides, poly(vinyl acetate), and polyvinylpyrrolidone, polyglycolides, polysiloxanes, polyurethanes and co-polymers thereof, celluloses including alkyl cellulose, hydroxyalkyl celluloses, cellulose ethers, cellulose esters, nitro celluloses, methyl cellulose, ethyl cellulose, hydroxypropyl cellulose, hydroxy-propyl methyl cellulose, hydroxybutyl methyl cellulose, cellulose acetate, cellulose propionate, cellulose acetate butyrate, cellulose acetate phthalate, carboxylethyl cellulose, cellulose triacetate, and cellulose sulphate sodium salt, polypropylene, polyethylenes including poly(ethylene glycol), poly(ethylene oxide), and poly(ethylene terephthalate), and polystyrene.

[0847] The polymer can be a biodegradable polymer, including a synthetic biodegradable polymer (e.g., polymers of lactic acid and glycolic acid, polyanhydrides, poly(ortho)esters, polyurethanes, poly(butic acid), poly(valeric acid), and poly(lactide-cocaprolactone)), and a natural biodegradable polymer (e.g., alginate and other polysaccharides including dextran and cellulose, collagen, chemical derivatives thereof (substitutions, additions of chemical groups, for example, alkyl, alkylene, hydroxylations, oxidations, and other modifications routinely made by those skilled in the art), albumin and other hydrophilic proteins (e.g., zein and other prolamines and hydrophobic proteins)), as well as any copolymer or mixture thereof. In general, these materials degrade either by enzymatic hydrolysis or exposure to water in vivo, by surface or bulk erosion.

[0848] The polymer can be a bioadhesive polymer, such as a bioerodible hydrogel described by H. S. Sawhney, C. P. Pathak and J. A. Hubbell in Macromolecules, 1993, 26, 581-587, the teachings of which are incorporated herein, polyhyaluronic acids, casein, gelatin, glutin, polyanhydrides, polyacrylic acid, alginate, chitosan, poly(methyl methacrylates), poly(ethyl methacrylates), poly(butylmethacrylate), poly(isobutyl methacrylate), poly(hexylmethacrylate), poly(isodecyl methacrylate), poly(lauryl methacrylate), poly(phenyl methacrylate), poly(methyl acrylate), poly(isopropyl acrylate), poly(isobutyl acrylate), and poly(octadecyl acrylate).

[0849] In some embodiments, the polymer is a water-soluble polymer. Suitable water-soluble polymers are known in the art and include, for example, polyvinylpyrrolidone, hydroxypropyl cellulose (HPC; Klucel), hydroxypropyl methylcellulose (HPMC; Methocel), nitrocellulose, hydroxypropyl ethylcellulose, hydroxypropyl butylcellulose, hydroxypropyl pentylcellulose, methyl cellulose, ethylcellulose (Ethocel), hydroxyethyl cellulose, various alkyl celluloses and hydroxyalkyl celluloses, various cellulose ethers, cellulose acetate, carboxymethyl cellulose, sodium carboxymethyl cellulose, calcium carboxymethyl cellulose, vinyl acetate/crotonic acid copolymers, poly-hydroxyalkyl methacrylate, hydroxymethyl methacrylate, methacrylic acid copolymers, polymethacrylic acid, polymethylmethacrylate, maleic anhydride/methyl vinyl ether copolymers, poly vinyl alcohol, sodium and calcium polyacrylic acid, polyacrylic acid, acidic carboxy polymers, carboxypolymethylene, carboxyvinyl polymers, polyoxyethylene polyoxypropylene copolymer, polymethylvinylether co-maleic anhydride, carboxymethylamide, potassium methacrylate divinylbenzene co-polymer, polyoxyethyleneglycols, polyethylene oxide, and derivatives, salts, and combinations thereof.

[0850] In a specific embodiment, the polymer is a polyalkylene glycol, including, for example, polyethylene glycol (PEG).

[0851] The carbohydrate may be any carbohydrate provided that it comprises or is made to comprise a carbonyl with an alpha leaving group. The carbohydrate, for example, may be one which has been derivatized to comprise a carbonyl with an alpha leaving group. In this regard, the carbohydrate may be a derivatized form of a monosaccharide (e.g., glucose, galactose, fructose), a disaccharide (e.g., sucrose, lactose, maltose), an oligosaccharide (e.g., raffinose, stachyose), a polysaccharide (a starch, amylase, amylopectin, cellulose, chitin, callose, laminarin, xylan, mannan, fucoidan, galactomannan.

[0852] With respect to the Class 4 peptides comprising a compound of Formula IV, the lipid may be any lipid comprising a carbonyl with an alpha leaving group. The lipid, for example, may be one which is derivatized to comprise the carbonyl. In this regard, the lipid, may be a derivative of a fatty acid (e.g., a C4-C30 fatty acid, eicosanoid, prostaglandin, leukotriene, thromboxane, N-acyl ethanolamine), glycerolipid (e.g., mono-, di-, tri-substituted glycerols), glycerophospholipid (e.g., phosphatidylcholine, phosphatidylinositol, phosphatidylethanolamine, phosphatidylserine), sphingolipid (e.g., sphingosine, ceramide), sterol lipid (e.g., steroid, cholesterol), prenol lipid, saccharolipid, or a polyketide.

[0853] oil, wax, cholesterol, sterol, fat-soluble vitamin, monoglyceride, diglyceride, triglyceride, a phospholipid.

[0854] In some embodiments, R7 has a molecular weight of about 100 kDa or less, e.g., about 90 kDa or less, about 80 kDa or less, about 70 kDa or less, about 60 kDa or less, about 50 kDa or less, about 40 kDa or less. Accordingly, R7 can have a molecular weight of about 35 kDa or less, about 30 kDa or less, about 25 kDa or less, about 20 kDa or less, about 15 kDa or less, about 10 kDa or less, about 5 kDa or less, or about 1 kDa.

[0855] In an alternative embodiment, the Class 4 peptide comprises as A, a peptide of 2 to 6 amino acids in which two consecutive amino acids of the peptide are linked via an ester or ether bond. The ester or ether bond may be, e.g., between amino acids 2 and 3, 3 and 4, 4 and 5, or 5 and 6. Optionally the peptide may be further modified by covalent linkage to another chemical moiety including linkage to a polymer (e.g. a hydrophilic polymer), alkylation, or acylation.

[0856] With regard to the Class 4 peptide comprising the general structure A-B-C, B represents amino acids of native glucagon, e.g., i to 26 of SEQ ID NO: 1301, wherein i is 3, 4, 5, 6, or 7, optionally comprising one or more amino acid modifications. In a specific embodiment, B represents amino acids 7 to 26 of SEQ ID NO: 1301, optionally further modified.

[0857] In some embodiments, B is modified by up to three amino acid modifications. For example, B, which represents native amino acid sequence of SEQ ID NO: 1301 is modified by one or more conservative amino acid modifications.

[0858] In another embodiment, B comprises one or more amino acid modifications selected from the group consisting of (iv) to (ix), as described herein. In a specific embodiment, B comprises one or both of the amino acid modifications (v) and (vi). In a further specific embodiment, B comprises one or a combination of amino acid modifications selected from the group consisting of (iv), (vii), (viii), and (ix), in addition to (v) and (vi).

[0859] In another specific embodiment, the Class 4 peptide comprises one or more charged amino acids at the C-terminus. For example, Y and/or Z can be a charged amino acid, e.g., Lys, Arg, His, Asp, and Glu. In yet another embodiment, the Class 4 peptide comprises one to two charged amino acids (e.g., Lys, Arg, His, Asp, and Glu)C-terminal to Z. In a specific aspect, Z followed by one to two charged amino acids does not comprise R10.

[0860] The Class 4 peptide in some embodiments comprises a hydrophilic moiety covalently bound to an amino acid residue of the Class 4 peptide, as described herein. For example, the Class 4 peptide can comprise a hydrophilic moiety covalently attached to an amino acid at position 1, 16, 20, 21, or 24 according to the numbering of SEQ ID NO: 1301. In another embodiment, the hydrophilic moiety is attached to the C-terminal amino acid of the Class 4 peptide, which in some cases, is 1 or 11 amino acids C-terminal to Z. In yet another embodiment, the hydrophilic moiety is attached to PLA, when A is PLA, PLA-Phe, or PLA-Thr-Phe, wherein PLA is modified to comprise the hydrophilic moiety. In another embodiment, an amino acid comprising a hydrophilic moiety is added to the N- or C-terminus of the Class 4 peptide. In another embodiment, the Class 4 peptide comprises an acyl group or alkyl group as described herein. For example, the acylation or alkylation can occur off the side chain of the amino acid at position 10, 20, or 24, according to the numbering of SEQ ID NO: 1301. In an alternative embodiment, the acylation or alkylation occurs off the side chain of the C-terminal amino acid of the Class 4 peptide, which in some cases, is 1 or 11 amino acids C-terminal to Z. In yet another embodiment, when A is PLA, PLA-Phe, or PLA-Thr-Phe, the PLA is modified to comprise an acyl or alkyl group.

### Exemplary Embodiments

[0861] The Class 4 peptide may comprise any amino acids, synthetic or naturally occurring, provided that at least two consecutive amino acids of the peptide are linked via an ester or ether bond. In a specific embodiment, the peptide comprises amino acids of native glucagon. For example, the peptide can comprise j to 6 of native glucagon (SEQ ID NO: 1301), wherein j is 1, 2, 3, 4, or 5. Alternatively, the peptide can comprise an amino acid sequence based on the N-terminus of SEQ ID NO: 1301 with one or more amino acid modifications. The amino acid at position 1 and/or position 2 may be an amino acid which reduces susceptibility to cleavage by dipeptidyl peptidase IV. For instance, the peptide can comprise at position 1 of the Class 4 peptide an amino acid selected from the group consisting of D-histidine, alpha, alpha-dimethyl imidiazole acetic acid (DMIA), N-methyl histidine, alpha-methyl histidine, imidazole acetic acid, desaminohistidine, hydroxyl-histidine, acetyl-histidine and homo-histidine. More particularly, in some embodiments, position 2 of the antagonist peptide is an amino acid selected from the group consisting of D-serine, D-alanine, valine, glycine, N-methyl serine, N-methyl alanine, and aminoisobutyric acid (AIB). Also, for example, the amino acid at position 3 of the Class 4 peptide may be glutamic acid, as opposed to the native glutamine residue of native glucagon. Accordingly, the Class 4 peptide can comprise an amino acid sequence of:

(SEQ ID NO: 1368)

Xaa₁-Xaa₂-Xaa₃-Thr-Gly-Phe;

(SEQ ID NO: 1369)

Xaa₂-Xaa₃-Thr-Gly-Phe;
or

(SEQ ID NO: 1370)

Xaa₃-Thr-Gly-Phe;

[0862] wherein Xaa₁ is selected from a group consisting of: His, D-histidine, alpha, alpha-dimethyl imidiazole acetic acid (DMIA), N-methyl histidine, alpha-methyl histidine, imidazole acetic acid, desaminohistidine, hydroxyl-histidine, acetyl-histidine and homo-histidine; Xaa₂ is selected from a group consisting of: Ser, D-serine, D-alanine, valine, glycine, N-methyl serine, N-methyl alanine, and aminoisobutyric acid (AIB); and Xaa₃ is Gln or Glu.

[0863] The present invention also encompasses embodiments wherein the C-terminal amino acid of the Class 4 peptides have an amide group substituting for the carboxylic acid group that is present on the native amino acid.

[0864] In some embodiments, wherein the Class 4 peptide is PEGylated, the Class 4 peptide comprises the shortened glucagon peptides, specifically 6-29 where the “N-terminal” amino acid is PLA (phenyl-lactic acid). Such glucagon derivatives exhibit unique virtues. They are more potent peptides than those with the native N-terminal phenylalanine and they suppress any glucagon agonism that results from pegylation, something not seen with the native phenylalanine. Finally, while the current literature establishes that a substitution of the native aspartic acid at position 9 is required for antagonist activity, applicants have discovered the surprising result that such a substitution is no longer required in the PLA⁶-(6-29) glucagon analogs.

[0865] In some embodiments an amino acid of the Class 4 peptide is substituted with at least one cysteine residue, wherein the side chain of the cysteine residue is further modified with a thiol reactive reagent, including for example, maleimido, vinyl sulfone, 2-pyridylthio, haloalkyl, and haloacyl. These thiol reactive reagents may contain carboxy, keto, hydroxyl, and ether groups as well as other hydrophilic moieties such as polyethylene glycol units. In an alternative embodiment, an amino acid of the Class 4 peptide is substituted with lysine, and the side chain of the substituting lysine residue is further modified using amine reactive reagents such as active esters (succinimido, anhydride, etc) of carboxylic acids or aldehydes of hydrophilic moieties such as polyethylene glycol. In accordance with some embodiments the lysine residue corresponding to position 12 of the native peptide is substituted with arginine and a single lysine substitution is inserted for one of the amino acids corresponding to position 1, 16, 17, 20, 21, 24 or 29 of the native peptide, or a lysine is added to the N- or C-terminus of the Class 4 peptide.

[0866] In another embodiment the methionine residue corresponding to position 27 of the native peptide is changed to leucine or norleucine to prevent oxidative degradation of the peptide.

[0867] In some embodiments, the Class 4 peptides described herein are further modified by truncation or deletion of one or two amino acids of the C-terminus of the glucagon peptide (i.e., truncation of the amino acid at position 29 or at positions 28 and 29 of native glucagon) without affecting activity and/or potency at the glucagon receptor. In this regard, the Class 4 peptide described herein can, for example, consist essentially of or consist of amino acids 1-27, 1-28, 2-27, 2-28, 3-27, 3-28, 4-27, 4-28, 5-27, 5-28, 6-27, or 6-28 of the native glucagon peptide (SEQ ID NO: 1301) with one or more modifications resulting in Class 4 peptideic activity as described herein.

[0868] The presently disclosed Class 4 peptides also encompass amino acid substitutions at positions that are known not to be critical to the function of the glucagon peptide. In some embodiments the substitutions are conservative amino acid substitutions at one, two or three positions selected from the group consisting of 2, 5, 6, 7, 8, 9, 12, 13, 14, 15, 16, 19, 22, 23 or 24 of SEQ ID NO: 1339. In some embodiments the Class 4 peptide comprises a derivative peptide of SEQ ID NO: 1342 wherein the glucagon peptide comprises a further amino acid substitution relative to SEQ ID NO: 1342 at one to three amino acid positions selected from positions 2, 5, 6, 8, 9, 12, 13 and 14. In some embodiments the substitutions at positions 2, 5, 6, 8, 9, 12, 13 and 14 of SEQ ID NO: 1342 are conservative amino acid substitutions. In some embodiments the amino acids corresponding to positions 16, 17, 20, 21, 24 or 29 of the native peptide, and more particularly at position 21 and/or 24 are substituted with cysteine or lysine, wherein a PEG chain is covalently attached to the substituted cysteine or lysine residue.

[0869] In accordance with some embodiments the modified Class 4 peptide comprises two or more polyethylene glycol chains covalently bound to the peptide wherein the total molecular weight of the glucagon chains is about 1,000 to about 5,000 Daltons. In some embodiments the pegylated Class 4 peptide comprises a peptide selected from the group consisting of SEQ ID NO: 1312, and SEQ ID NO: 1322, wherein said peptide comprise a polyethylene glycol chain linked to the amino acid at positions 11 and 19 and the combined molecular weight of the two PEG chains is about 1,000 to about 5,000 Daltons.

[0870] In accordance with some embodiments a Class 4 peptide is provided comprising a modified glucagon peptide selected from the group consisting of:

(SEQ ID NO: 1309)

R₁-Phe-Thr-Ser-Xaa-Tyr-Ser-Xaa-Tyr-Leu-Xaa-Xaa-
Arg-Arg-Ala-Gln-Asp-Phe-Val-Gln-Trp-Leu- Xaa-Asn-
Thr-R₂,

(SEQ ID NO: 1310)

R₁-Phe-Thr-Ser-Xaa-Tyr-Ser-Xaa-Tyr-Leu-Asp-Ser-
Arg-Arg-Ala-Gln-Xaa-Phe-Val-Gln-Trp-Leu- Xaa-Asn-
Thr-R₂,

(SEQ ID NO: 1311)

R₁-Phe-Thr-Ser-Xaa-Tyr-Ser-Xaa-Tyr-Leu-Asp-Ser-
Arg-Arg-Ala-Gln-Asp-Phe-Val-Xaa-Trp-Leu-Xaa-Asn-
Thr-R₂
and

(SEQ ID NO: 1312)

R₁-Phe-Thr-Ser-Xaa-Tyr-Ser-Xaa-Tyr-Leu-Asp-Ser-
Arg-Arg-Ala-Gln-Xaa-Phe-Val-Xaa-Trp-Leu- Xaa-Asn-
Thr-R₂,

[0871] wherein Xaa at position 4=aspartic acid, glutamic acid, cysteic acid or homocysteic acid, Xaa at position 7=Lys or Arg, Xaa at position 10 is aspartic acid, cysteic acid, glutamic acid, homoglutamic acid and homocysteic acid; Xaa at position 11 is Ser, Lys, Cys, Orn, homocysteine or acetyl phenylalanine, Xaa at position 16 is Asp, Lys, Cys, Orn, homocysteine or acetyl phenylalanine a and Xaa at position 19 is Gln, Lys, Cys, Orn, homocysteine and acetyl phenylalanine, Xaa at position 22=Met, Leu or Nle, R₁ is OH or NH₂, and R₂ is COOH or CONH₂, wherein the peptide is pegylated at position 11 for SEQ ID NO: 1309, at position 16 for SEQ ID NO: 1310, position 19 for SEQ ID NO: 1311 and at positions 16 and 19 of SEQ ID NO: 1312, with the proviso that when Xaa at position 4=aspartic acid then R₁ is OH. In accordance with some embodiments the peptide comprises the sequence of SEQ ID NO: 1309, SEQ ID NO: 1310 or SEQ ID NO: 1311, wherein R₁ is OH and R₂ is CONH₂. In some embodiments the peptide comprises the sequence of SEQ ID NO: 1309, SEQ ID NO: 1310 or SEQ ID NO: 1311, wherein R₁ is OH, R₂ is CONH₂ and the amino acid at position 4 is aspartic acid, and in a further embodiment such peptides comprise a carboxy terminal extension comprising the sequence of SEQ ID NO: 1319.

[0872] In accordance with some embodiments the peptide comprises a sequence selected from the group consisting of SEQ ID NO: 1309, SEQ ID NO: 1310, SEQ ID NO: 1313, SEQ ID NO: 1314, and SEQ ID NO: 1316, wherein the peptide is pegylated at position 11 for SEQ ID NO: 1309 and SEQ ID NO: 1313, pegylated at position 16 for SEQ ID NO: 1310, and pegylated at position 19 for SEQ ID NO: 1310 and SEQ ID NO: 1314. In some embodiments the glucagon agonist comprises the peptide of SEQ ID NO: 1313 or SEQ ID NO: 1314. In some embodiments the C-terminal amino acid of the Class 4 peptides disclosed herein have an amide group in place of the carboxylic acid group that is present on the native amino acid. In accordance with some embodiments the Class 4 peptide comprises the sequence of SEQ ID NO: 1318.

[0873] In accordance with some embodiments, a Class 4 peptide is provided wherein a plasma protein has been covalently linked to an amino acid side chain of the peptide to improve the solubility, stability and/or pharmacokinetics of the glucagon peptide. For example, serum albumin can be covalently bound to the Class 4 peptides presented herein. In some embodiments the plasma protein is covalently bound to an amino acid corresponding to position 16, 17, 20, 21, 24 or 29 of the native glucagon peptide. More particularly, in some embodiments the plasma protein is bound to an amino acid corresponding to position 16 or 24 of the native glucagon peptide, wherein the Class 4 peptide comprises the sequence of SEQ ID NO: 1303, SEQ ID NO: 1304, SEQ ID NO: 1305, SEQ ID NO: 1306, SEQ ID NO: 1307, SEQ ID NO: 1308, SEQ ID NO: 1309, SEQ ID NO: 1311, SEQ ID NO: 1312, SEQ ID NO: 1322, SEQ ID NO: 1323, SEQ ID NO: 1324, SEQ ID NO: 1325, SEQ ID NO: 1326, SEQ ID NO: 1327, SEQ ID NO: 1328, SEQ ID NO: 1336 and SEQ ID NO: 1339. In some embodiments the Class 4 peptide comprises a peptide selected from the group consisting of SEQ ID NO: 1309, SEQ ID NO: 1310, SEQ ID NO: 1311 and SEQ ID NO: 1312.

[0874] In accordance with some embodiments, a Class 4 peptide is provided wherein a linear amino acid sequence representing the Fc portion of an immunoglobin molecule has been covalently linked to an amino acid side chain of a Class 4 peptide disclosed herein to improve the solubility, stability and/or pharmacokinetics of the glucagon peptide. For example, the amino acid sequence representing the Fc portion of an immunoglobin molecule can be covalently bound to position 11, 12, 15, 16, 19, 21 or 24 of the glucagon peptide of SEQ ID NO: 1307, SEQ ID NO: 1339, or a glucagon analog thereof. In some embodiments the Fc peptide is covalently bound to position 11 or 19 of the Class 4 peptide of SEQ ID NO: 1306, SEQ ID NO: 1307, SEQ ID NO: 1308 or SEQ ID NO: 1336. The Fc portion is usually isolated from IgG, but the Fc peptide fragment from any immunoglobin should function equivalently. In some embodiments the glucagon peptide is selected from the group consisting of SEQ ID NO: 1303, SEQ ID NO: 1304, SEQ ID NO: 1305, SEQ ID NO: 1307 SEQ ID NO: 1308, and SEQ ID NO: 1339, wherein the Fc portion is linked to the corresponding position of 16, 17, 20, 21, 24 or 29 of the native glucagon peptide. In some embodiments the Class 4 peptide comprises a glucagon peptide selected from the group consisting of SEQ ID NO: 1309, SEQ ID NO: 1310, SEQ ID NO: 1311 and SEQ ID NO: 1312, wherein the Fc peptide is bound to the side chain of the amino acid located at position 11, 16 or 19 of SEQ ID NO: 1309, SEQ ID NO: 1310, SEQ ID NO: 1311, respectively, and at both positions 11 and 19 for SEQ ID NO: 1312.

[0875] In certain embodiments of the invention, the Class 4 peptide comprises the amino acid sequence of any of SEQ ID NOs: 1362, 1364-1367, and 1371.

[0876] Modifications to Improve Solubility

[0877] The Class 4 peptides can be further modified to improve the peptide's solubility in aqueous solutions at physiological pH, while, in some aspects retaining a glucagon antagonist activity. Introduction of hydrophilic groups at positions corresponding to positions 1, 16, 17, 20, 21, 24 and 29 of the native peptide, or at the C-terminus, can improve the solubility of the resulting Class 4 peptide in solutions having a physiological pH, while retaining the parent compounds antagonist activity. Therefore, in some embodiments the presently disclosed Class 4 peptides are further modified to comprise one or more hydrophilic groups covalently linked to the side chains of amino acids corresponding to amino acid positions 1, 16, 17, 20, 21, 24 and 29 of the native glucagon peptide or of the N- or C-terminal amino acid. In a further embodiment the side chains of amino acids corresponding to amino acid positions 16 and 24 of the native glucagon peptide are covalently bound to hydrophilic groups, and in some embodiments the hydrophilic group is polyethylene glycol (PEG).

[0878] Applicants have also discovered that native glucagon can be modified by introducing charge at its carboxy terminus to enhance the solubility of the peptide while retaining the agonist properties of the peptide. The enhanced solubility allows for the preparation and storage of glucagon solutions at near neutral pH. Formulating glucagon solutions at relatively neutral pHs (e.g. pH of about 6.0 to about 8.0) improves the long term stability of the Class 4 peptides.

[0879] Again, applicants anticipate that the Class 4 peptides disclosed herein can be similarly modified to enhance their solubility in aqueous solutions at relatively neutral pH (e.g. pH of about 6.0 to about 8.0) while retaining the antagonist properties of the parent protein. Accordingly, some embodiments of the present invention is directed to a Class 4 peptide of SEQ ID NO: 1339 that has been further modified relative to the native amino acids present at positions 6-29 of the wild type glucagon (SEQ ID NO: 1301) to add charge to the peptide by the substitution of native non-charged amino acids with charged amino acids, or the addition of charged amino acids to the carboxy terminus. In accordance with some embodiments, one to three of the non-charged native amino acids of the Class 4 peptide of SEQ ID NO: 1339 are replaced with a charged amino acid. In some embodiments the charged amino acid is selected from the group consisting of lysine, arginine, histidine, aspartic acid and glutamic acid. More particularly, applicants have discovered that substituting the normally occurring amino acid at corresponding position 28 and/or 29 relative to native glucagon with charged amino acids, and/or the addition of one to two charged amino acids at the carboxy terminus of the Class 4 peptide, enhances the solubility and stability of the Class 4 peptides in aqueous solutions at physiologically relevant pHs (i.e., a pH of about 6.5 to about 7.5). Accordingly, such modifications of the Class 4 peptide disclosed herein are anticipated to have a similar effect on the solubility in aqueous solutions, particularly at a pH ranging from about 5.5 to about 8.0, while retaining the parent peptide's biological activity

[0880] In accordance with some embodiments the Class 4 peptide of SEQ ID NO: 1339 is modified by the substitution of the native amino acid at corresponding position 28 and/or 29 relative to native glucagon with a negatively charged amino acid (e.g., aspartic acid or glutamic acid) and optionally the addition of a negatively charged amino acid (e.g., aspartic acid or glutamic acid) to the carboxy terminus of the peptide. In an alternative embodiment the Class 4 peptide of SEQ ID NO: 1339 is modified by the substitution of the native amino acid at corresponding position 29 relative to native glucagon with a positively charged amino acid (e.g., lysine, arginine or histidine) and optionally the addition of one or two positively charged amino acid (e.g., lysine, arginine or histidine) on the carboxy terminus of the peptide. In accordance with some embodiments a Class 4 peptide having improved solubility and stability is provided wherein the peptide comprises the amino acid sequence of SEQ ID NO: 1341 with the proviso that at least one amino acids at position, 23, or 24 of SEQ ID NO: 1341 is substituted with an acidic amino acid, and/or an additional acidic amino acid is added at the carboxy terminus of SEQ ID NO: 1341. In some embodiments the acidic amino acids are independently selected from the group consisting of Asp, Glu, cysteic acid and homocysteic acid.

[0881] In accordance with some embodiments a Class 4 peptide having improved solubility and stability is provided wherein the antagonist comprises the amino acid sequence of SEQ ID NO: 1341, SEQ ID NO: 1342, SEQ ID NO: 1343 or SEQ ID NO: 1344, wherein at least one of the amino acids at positions 23 or 24 is substituted with a non-native amino acid residue (i.e. at least one amino acid present at position 23 or 24 of the analog is an acidic amino acid different from the amino acid present at the corresponding position in SEQ ID NO: 1307). In accordance with some embodiments a glucagon agonist is provided comprising the sequence of SEQ ID NO: 1341 or 1342 with the proviso that when the amino acid at position 23 is asparagine and the amino acid at position 24 is threonine, the peptide further comprises one to two amino acids, independently selected from the group consisting of Lys, Arg, His, Asp or Glu, added to the carboxy terminus of the Class 4 peptide.

[0882] In another embodiment the solubility of the Class 4 peptide of SEQ ID NO: 1342 can be improved by covalently linking a hydrophilic moiety to an amino acid residue at position 11, 12, 15, 16, 19 or 24, and in some embodiments the hydrophilic moiety is linked to an amino acid at position 11, 16 or 19, and in a further embodiment the hydrophilic moiety is linked to amino acid 19. In some embodiments the hydrophilic moiety is a plasma protein or the Fc portion of an immunoglobin, and in an alternative embodiment the hydrophilic moiety is a hydrophilic hydrocarbon chain. In some embodiments the hydrophilic moiety is polyethylene glycol, having a molecular weight selected from the range of about 1,000 to about 5,000 Daltons. In another embodiment the hydrophilic moiety is polyethylene glycol, having a molecular weight of at least about 20,000 Daltons. In some embodiments the polyethylene modified Class 4 peptide comprises the amino acids sequence of SEQ ID NO: 1309, SEQ ID NO: 1310, SEQ ID NO: 1311, SEQ ID NO: 1312, SEQ ID NO: 1343, SEQ ID NO: 1344 or SEQ ID NO: 1345.

[0883] Modifications to Improve Stability

[0884] The Asp-Ser sequence at position 15-16 of native glucagon has been identified as a uniquely unstable dipeptide that leads to premature chemical cleavage of the native hormone in aqueous buffers. For example, when maintained at 0.01N HCl at 37° C. for 2 weeks, more than 50% of the native glucagon may be cleaved into fragments. The two liberated cleavage peptides 1-15 and 16-29 are devoid of glucagon-like biological activity and thus represent a limitation on the aqueous pre-formulation of glucagon and its related analogs. The selective chemical substitution of the Asp at position 15 of the native glucagon peptide with Glu has been observed to virtually eliminate chemical cleavage of the 15-16 peptide bond.

[0885] Accordingly, it is expected that the Class 4 peptides of the present invention can be similarly modified to decrease their susceptibility to premature chemical cleavage in aqueous buffers. In accordance with some embodiments the Class 4 peptides described herein can be further modified to enhance their stability in aqueous solutions by replacing the native aspartic amino acid, located at position 15 of the native glucagon peptide, with an amino acid selected from the group consisting of cysteic acid, glutamic acid, homoglutamic acid and homocysteic acid. In accordance with some embodiments the aspartic acid residue at position 10 of the Class 4 peptide of SEQ ID NO: 1339 can be substituted with an amino acid selected from the group consisting of cysteic acid, glutamic acid, homoglutamic acid and homocysteic acid, and in some embodiments the native aspartic acid at position 10 of SEQ ID NO: 1339 is replaced with glutamic acid. In accordance with some embodiments a Class 4 peptide having improved stability in aqueous solutions is provided wherein the antagonist comprises a sequence selected from the group consisting of SEQ ID NO: 1336, SEQ ID NO: 1340 and SEQ ID NO: 1342. In a further embodiment the Class 4 peptide is amidated.

[0886] In accordance with some embodiments, increased stability by way of reduced degradation of the Class 4 peptide described herein may also be achieved by substitution of the serine at position 16 (according to the numbering of native glucagon) with glutamic acid, cysteic acid, homo-glutamic acid, or homo-cysteic acid. In a specific embodiment, the serine at position 16 (according to the native glucagon sequence numbering) is replaced with glutamic acid. In a more specific aspect, the Class 4 peptide comprising such a modification comprises a C-terminal carboxylate and is not amidated.

[0887] In accordance with some embodiments, a Class 4 peptide is provided comprising a glucagon peptide selected from the group consisting of SEQ ID NO: 1307, SEQ ID NO: 1336, SEQ ID NO: 1339, SEQ ID NO: 1340, SEQ ID NO: 1341, SEQ ID NO: 1342, SEQ ID NO: 1343 and SEQ ID NO: 1344, further modified by one or more additional amino acid substitutions at positions corresponding to positions 11, 12, 15, 16, 19 and/or 24 of the native glucagon peptide, wherein the amino acid substitutions comprise a substitution with an amino acid having a side chain suitable for crosslinking with hydrophilic moieties, including for example, PEG. The peptide can be substituted with a naturally occurring amino acid or a synthetic (non-naturally occurring) amino acid. Synthetic or non-naturally occurring amino acids refer to amino acids that do not naturally occur in vivo but which, nevertheless, can be incorporated into the peptide structures described herein. In some embodiments a Class 4 peptide is provided wherein the peptide comprises the sequence of SEQ ID NO: 1307, SEQ ID NO: 1336, SEQ ID NO: 1339, SEQ ID NO: 1340, SEQ ID NO: 1341, SEQ ID NO: 1342, SEQ ID NO: 1343 and SEQ ID NO: 1344, and further comprises a polyethylene glycol chain bound to corresponding position 21 or 24 of the native glucagon peptide. In a further embodiment the C-terminus of the Class 4 peptide is modified to replace the carboxylic acid group with an amide group.

[0888] Fusion Peptides and Conjugates

[0889] The present disclosure also encompasses Class 4 peptide fusion peptides wherein a second peptide has been fused to the C-terminus of the Class 4 peptide. More particularly, the fusion peptide may comprise a Class 4 peptide peptide of SEQ ID NO: 1344 that further comprises an amino acid sequence of SEQ ID NO: 1319 (GPSSGAPPPS), SEQ ID NO: 1320 (Lys Arg Asn Arg Asn Asn Ile Ala) or SEQ ID NO: 1321 (Lys Arg Asn Arg) linked to the c-terminal amino acid of the Class 4 peptide. In some embodiments the amino acid sequence of SEQ ID NO: 1319 (GPSSGAPPPS) is bound to amino acid 24 of the Class 4 peptide of SEQ ID NO: 1342 through a peptide bond. In another embodiment the fusion peptide comprises a Class 4 peptide peptide of SEQ ID NO: 1307, SEQ ID NO: 1336, SEQ ID NO: 1339, SEQ ID NO: 1340, SEQ ID NO: 1341 or SEQ ID NO: 1343 that further comprises an amino acid sequence of SEQ ID NO: 1319 (GPSSGAPPPS) linked to amino acid 24 of the Class 4 peptide. In another embodiment the fusion peptide comprises a Class 4 peptide peptide of SEQ ID NO: 1307, SEQ ID NO: 1336, SEQ ID NO: 1337, SEQ ID NO: 1338, SEQ ID NO: 1339, SEQ ID NO: 1341 or SEQ ID NO: 1343 that further comprises an amino acid sequence of SEQ ID NO: 1320, SEQ ID NO: 1321 or SEQ ID NO: 1353 linked to amino acid 24 of the Class 4 peptide. In some embodiments the Class 4 peptide fusion peptide comprises a sequence selected from the group consisting of SEQ ID NO: 1346 and SEQ ID NO 1347. In a further embodiment the C-terminus of the fusion peptide is modified to replace the carboxylic acid group with an amide group.

[0890] In some embodiments a Class 4 peptide fusion peptide is provided wherein the Class 4 peptide portion of the fusion peptide is selected from the group consisting of SEQ ID NO: 1303, SEQ ID NO: 1304, SEQ ID NO: 1305, SEQ ID NO: 1306, SEQ ID NO: 1307, SEQ ID NO: 1308, SEQ ID NO: 1309, SEQ ID NO: 1311, SEQ ID NO: 1312, SEQ ID NO: 1313, SEQ ID NO: 1314, SEQ ID NO: 1315, SEQ ID NO: 1310, SEQ ID NO: 1316, SEQ ID NO: 1317, SEQ ID NO: 1318 and SEQ ID NO: 1339 and the sequence of SEQ ID NO: 1319 is fused to the carboxy terminus of the Class 4 peptide portion, and wherein the PEG chain, when present, is selected from the range of 500 to 40,000 Daltons. More particularly, in some embodiments the Class 4 peptide segment is selected from the group consisting of SEQ ID NO: 1313, SEQ ID NO: 1314, SEQ ID NO: 1315, SEQ ID NO: 1316, SEQ ID NO: 1346 and SEQ ID NO: 1347 wherein the PEG chain is selected from the range of about 500 to about 5,000 Daltons, and more particularly, in some embodiments the PEG chain is about 1,000 Daltons. In a further embodiment the C-terminus is modified to replace the carboxylic acid group with an amide group.

[0891] The Class 4 peptide may further comprise one to two charged amino acids added to the carboxy terminus. In some embodiments, wherein one to two charged amino acids are added to the carboxy terminus of SEQ ID NO: 1344, the amino acids are negatively charged amino acids, including for example glutamic acid and aspartic acid. In some embodiments, the Class 4 peptide comprises the sequence of SEQ ID NO: 1342 wherein at least one of corresponding positions 27 and 28 relative to the native glucagon peptide comprises an amino acid selected from the group consisting of aspartic acid and glutamic acid and wherein SEQ ID NO: 1342 is optionally modified to include an addition one to two negatively charged amino acids added to the carboxy terminus. In some embodiments the negatively charged amino acids are glutamic acid or aspartic acid.

[0892] The Class 4 peptides disclosed herein can be combined with other active agents, including for example, insulin, to treat diseases or conditions that are characterized by excessive glucagon activity. In some embodiments, Class 4 peptides that have been modified to be covalently bound to a PEG chain having a molecular weight of greater than 10,000 Daltons can be administered in conjunction with insulin to help to maintain stable blood glucose levels in diabetics. The Class 4 peptides of the present disclosure can be co-administered with insulin as a single composition, simultaneously administered as separate solutions, or alternatively, the insulin and the Class 4 peptide can be administered at different times relative to one another. In some embodiments the composition comprising insulin and the composition comprising the Class 4 peptide are administered within 12 hours of one another. The exact ratio of the Class 4 peptide relative to the administered insulin will be dependent in part on determining the glucagon levels of the patient, and can be determined through routine experimentation.

[0893] Dimer Peptides

[0894] The present disclosure also encompasses multimers of the modified Class 4 peptides disclosed herein. Two or more of the modified Class 4 peptides can be linked together using standard linking agents and procedures known to those skilled in the art. For example, dimers can be formed between two modified Class 4 peptides through the use of bifunctional thiol crosslinkers and bi-functional amine crosslinkers, particularly for Class 4 peptides that have been substituted (at positions 11, 16 or 19, for example) with cysteine, lysine ornithine, homocysteine or acetyl phenylalanine residues (e.g. SEQ ID NO: 1309, SEQ ID NO: 1310, SEQ ID NO: 1311 and SEQ ID NO: 1312). The dimer can be a homodimer or alternatively can be a heterodimer. In some embodiments the dimer is formed between two Class 4 peptides independently selected from the group consisting of SEQ ID NO: 1308, SEQ ID NO: 1309, SEQ ID NO: 1310, SEQ ID NO: 1311, SEQ ID NO: 1312, SEQ ID NO: 1345, SEQ ID NO: 1346, or SEQ ID NO: 1347, wherein the two peptides are linked to one another via a linker attached to position 11 of each peptide, 16 of each peptide, or position 19 of each peptide or any combination thereof. In some embodiments the linkage is a disulfide linkage between a Cys11 to Cys11 or a Cys19 to Cys19 or a Cys11 to Cys19 residue of the respective Class 4 peptide peptides.

[0895] Similarly, a dimer can be formed between two Class 4 peptide peptides independently selected form the group consisting of SEQ ID NO: 1303, SEQ ID NO: 1304, SEQ ID NO: 1305, SEQ ID NO: 1306, SEQ ID NO: 1307, SEQ ID NO: 1308, SEQ ID NO: 1309, SEQ ID NO: 1310, SEQ ID NO: 1311, SEQ ID NO: 1312, SEQ ID NO: 1336, SEQ ID NO: 1337, SEQ ID NO: 1338, SEQ ID NO: 1339 and SEQ ID NO: 1342 wherein the linkage is formed between amino acid positions independently selected from positions 16, 21 and 24 with respect to the native glucagon peptide.

[0896] In accordance with some embodiments a Class 4 peptide dimer is provided comprising two Class 4 peptides, each comprising the sequence of SEQ ID NO: 1346, wherein the two antagonists are linked to one another by a disulfide bond through amino acid position 25. In another embodiment a Class 4 peptide dimer is provided comprising two Class 4 peptides, each comprising the sequence of SEQ ID NO: 1347, wherein the two antagonists are linked to one another by a disulfide bond through amino acid position 35. In some embodiments the dimer is formed from Class 4 peptides of SEQ ID NO: 1346 and SEQ ID NO: 1347 wherein the amino acid at position 10 is glutamic acid.

[0897] In some embodiments the dimer comprises a homodimer of a Class 4 peptide fusion peptide selected from the group consisting of SEQ ID NO: 1307, SEQ ID NO: 1308, SEQ ID NO: 1336, SEQ ID NO: 1337, SEQ ID NO: 1340, SEQ ID NO: 1339, NO: 1340, SEQ ID NO: 1341, SEQ ID NO: 1342 and pharmaceutically acceptable salts of said Class 4 peptides. In accordance with some embodiments a dimer is provided comprising a first Class 4 peptide bound to a second Class 4 peptide via a linker, wherein the first and second peptides of the dimer are independently selected from the group consisting of SEQ ID NO: 1307, SEQ ID NO: 1308, SEQ ID NO: 1336, SEQ ID NO: 1337, SEQ ID NO: 1339, SEQ ID NO: 1340, SEQ ID NO: 1341, and SEQ ID NO: 1342, and pharmaceutically acceptable salts of said glucagon polypeptides. In another embodiment the first and second Class 4 peptides of the dimer are independently selected from the group consisting of SEQ ID NO: 1307, SEQ ID NO: 1308, SEQ ID NO: 1336 and SEQ ID NO: 1339.

[0898] In another embodiment the dimer comprises a homodimer of a Class 4 peptide selected from the group consisting of SEQ ID NO: 1323, SEQ ID NO: 1324, SEQ ID NO: 1325, SEQ ID NO: 1326, SEQ ID NO: 1327, SEQ ID NO: 1328, SEQ ID NO: 1329, SEQ ID NO: 1330, SEQ ID NO: 1331. In another embodiment, a Class 4 peptide dimer is provided wherein the first and second peptides of the dimer comprise an amino acid sequence independently selected from the group consisting of SEQ ID NO: 1323, SEQ ID NO: 1324, SEQ ID NO: 1325, SEQ ID NO: 1326, SEQ ID NO: 1327 and SEQ ID NO: 1328. In another embodiment the dimer comprises a homodimer of a Class 4 peptide selected from the group consisting of SEQ ID NO: 1309, SEQ ID NO: 1311 and SEQ ID NO: 1312, wherein the peptide further comprises a polyethylene glycol chain covalently bound to position 11 or 19 of the glucagon peptide.

[0899] The Class 4 glucagon related peptide may comprise the amino acid sequence of any of SEQ ID NOs: 1301-1371, optionally with up to 1, 2, 3, 4, or 5 further modifications that retain glucagon antagonist activity.

### Class 5 Glucagon Related Peptides

[0900] In certain embodiments, a glucagon related peptide is a class 5 glucagon related peptide (see, e.g., International (PCT) Patent Application No. PCT/US2008/081333, incorporated herein by reference in its entirety).

[0901] All biological sequences referenced in the following section (SEQ ID NOs: 1401-1518) correspond to SEQ ID NOs.: 1-118 in International Patent Application No. PCT/US2008/081333.

[0902] Activity

[0903] In certain aspects a class 5 glucagon related peptide (hereafter referred to as a “class 5 peptide”) may be a glucagon antagonist/GLP-1 agonist. Glucagon antagonists/GLP-1 agonists are utilized in any setting where the suppression of glucagon agonism is desired while simultaneous stimulation of GLP-1 activity is also desired. For example, glucagon antagonist activity in conjunction with GLP-1 stimulation can be used in the treatment of diabetes where glucagon antagonism has been demonstrated in pre-clinical models of hyperglycemia to yield a lowering of blood glucose and GLP-1 activity is associated with insulin production. Compounds demonstrating GLP-1 activity have also been known to be useful for treating obesity and preventing weight gain.

[0904] In certain aspects class 5 peptides are believed to be suitable for any use that has previously been described for other glucagon antagonist/GLP-1 agonists. These two activities have separately been shown to be highly desirable properties for the treatment of the metabolic syndrome, specifically diabetes and obesity. The glucagon antagonist activity is useful in any setting where the suppression of glucagon agonism is desired. The presence of GLP-1 agonism further suppresses the endogenous secretion of glucagon from the pancreas while stimulating insulin synthesis and secretion. The two pharmacological actions serve in a synergistic fashion to normalize metabolic abnormalities. Accordingly, the Class 5 peptides can be used to treat hyperglycemia, or treat other metabolic diseases that result from high blood levels of glucagon or high blood glucose levels. In accordance with some embodiments the patient to be treated using the glucagon antagonist/GLP-1 agonists such as class 5 peptides disclosed herein is a domesticated animal, and in another embodiment the patient to be treated is a human. Studies suggest that lack of glucagon suppression in diabetic patients contributes to postprandial hyperglycemia in part via accelerated glycogenolysis. Analysis of blood glucose during an Oral Glucose Tolerance Test (OGTT), and in the presence or absence of somatostatin-induced glucagon suppression has shown a significant increase in glucose in subjects with higher glucagon levels. Accordingly, a glucagon antagonist/GLP-1 agonists or Class 5 peptides described herein can be used to treating hyperglycemia, and are expected to be useful for treating a variety of types of diabetes including diabetes mellitus type I, diabetes mellitus type II, or gestational diabetes, either insulin-dependent or non-insulin-dependent, and reducing complications of diabetes including nephropathy, retinopathy and vascular disease.

[0905] Such methods for reducing appetite or promoting loss of body weight are expected to be useful in reducing body weight, preventing weight gain, or treating obesity of various causes, including drug-induced obesity, and reducing complications associated with obesity including vascular disease (coronary artery disease, stroke, peripheral vascular disease, ischemia reperfusion, etc.), hypertension, onset of diabetes type II, hyperlipidemia and musculoskeletal diseases.

[0906] Pharmaceutical compositions comprising class 5 peptides can be formulated and administered to patients using standard pharmaeuctically acceptable carriers and routes of administration known to those skilled in the art. Accordingly, the present disclosure also encompasses pharmaceutical compositions comprising one or more class 5 peptides disclosed herein in combination with a pharmaceutically acceptable carrier. The pharmaceutical compositions may comprise the class 5 peptides as the sole pharmaceutically active component, or the class 5 peptides can be combined with one or more additional active agents. In accordance with some embodiments a composition is provided comprising a Class 5 peptide and insulin or an insulin analog. Alternatively, a composition is provided for inducing weight loss or preventing weight gain can be provided that comprises the sequence of SEQ ID NO: 1415 or SEQ ID NO: 1451 further comprising the amino acid sequence of SEQ ID NO: 1421 (GPSSGAPPPS) or SEQ ID NO: 1450 linked to amino acid 24 of SEQ ID NO: 1415 or SEQ ID NO: 1451, and an anti-obesity peptide. Suitable anti-obesity peptides include those disclosed in U.S. Pat. Nos. 5,691,309, 6,436,435 or US Patent application 20050176643.

[0907] Class 5 Peptide Structure

[0908] In accordance with some embodiments a Class 5 peptide is provided comprising a glucagon peptide that has been modified by the deletion of the first 1 to 5 amino acids residues (e.g., first amino acid, first two amino acids, first three amino acids, first four amino acids, first five amino acids) from the N-terminus, and stabilization of the alpha-helix structure in the C-terminal portion of the compound (around amino acid positions 12-29 according to the amino acid numbering of wild type glucagon, SEQ ID NO: 1401), e.g., by the linkage of the side chains of amino acid pairs, selected from positions 12 and 16, 16 and 20, 20 and 24, and 24 and 28 (relative to the native glucagon peptide sequence), to one another through hydrogen-bonding or ionic interactions, such as the formation of salt bridges, or by covalent bonds. Alternatively, stabilization of the alpha-helix around residues 12-29 is achieved through introduction of one or more α, α-disubstituted amino acids at positions that retain the desired activity. In some embodiments, one, two, three, four or more of positions 16, 17, 18, 19, 20, 21, 24 or 29 (according to the amino acid numbering of wild type glucagon) of the Class 5 peptide or analog thereof is substituted with an α, α-disubstituted amino acid. For example, substitution of position 16 (according to the amino acid numbering of wild type glucagon) of a Class 5 peptide or analog thereof with amino iso-butyric acid (AIB) provides a stabilized alpha helix in the absence of a salt bridge or lactam. In some embodiments, one, two, three or more of positions 16, 20, 21 or 24 (according to the amino acid numbering of wild type glucagon) are substituted with AIB

[0909] In accordance with some embodiments, a class 5 peptide is provided wherein the peptide exhibits at least 80% of the maximum agonism achieved by native GLP-1 at the GLP-1 receptor, and exhibits glucagon antagonist activity that reduces the maximum glucagon-induced cAMP production at the glucagon receptor by at least about 50%, as measured by cAMP production in an in vitro assay. In some embodiments, the class 5 peptide exhibits at least 90% of the activity of native GLP-1 at the GLP-1 receptor, and exhibits glucagon antagonist activity, that reduces the maximum glucagon-induced cAMP production at the glucagon receptor by at least about 80%.

[0910] In accordance with some embodiments the class 5 peptide comprises a derivative peptide of SEQ ID NO: 1402 wherein the peptide comprises further amino acid substitutions relative to SEQ ID NO: 1402 at one to three amino acid positions selected from positions 1, 2, 4, 5, 6, 7, 8, 9, 10, 11, 12, 13, 14, 15, 16, 19, 22 and 24, and exhibits at least 90% of the activity of native GLP-1 at the GLP-1 receptor, and exhibits glucagon antagonist activity, that reduces the maximum glucagon-induced cAMP production at the glucagon receptor by at least about 80%.

[0911] In some embodiments, the alpha-helix structure in the C-terminal portion of the Class 5 peptide (around amino acids 12-29 according to the amino acid numbering of wild type glucagon) is stabilized by, e.g., formation of a covalent or non-covalent intramolecular bridge, or substitution and/or insertion of amino acids around positions 12-29 with an alpha helix-stabilizing amino acid (e.g., an α,α-disubstituted amino acid). In some embodiments, one, two, three, four or more of positions 16, 17, 18, 19, 20, 21, 24 or 29 (according to the amino acid numbering of wild type glucagon) of the Class 5 peptide or analog thereof is substituted with an α, α-disubstituted amino acid e.g., amino isobutyric acid (AIB). For example, substitution of position 16 (according to the amino acid numbering of wild type glucagon) of a Class 5 peptide or analog thereof with amino iso-butyric acid (AIB) provides a stabilized alpha helix in the absence of a salt bridge or lactam.

[0912] In some embodiments the class 5 peptide comprises SEQ ID NO: 1415 or SEQ ID NO: 1451, and more particularly, a sequence selected from the group consisting of SEQ ID NO: 1405, SEQ ID NO: 1406, SEQ ID NO: 1407, SEQ ID NO: 1408, SEQ ID NO: 1409, SEQ ID NO: 1416, SEQ ID NO: 1417, SEQ ID NO: 1418, SEQ ID NO: 1419, SEQ ID NO: 1422, SEQ ID NO: 1423, SEQ ID NO: 1424 and SEQ ID NO: 1425. In further embodiments the class 5 peptide comprises a derivative peptide of SEQ ID NO: 1415 or SEQ ID NO: 1451 wherein the peptide comprises a further amino acid substitution relative to SEQ ID NO: 1415 or SEQ ID NO: 1451 at one to three amino acid positions selected from positions 1, 2, 5, 6, 8, 9, 12, 13 and 14. In some embodiments the substitutions at positions 1, 2, 5, 6, 8, 9, 12, 13 and 14 are conservative amino acid substitutions. In some embodiments the threonine at position 24 of SEQ ID NO: 1405 or SEQ ID NO: 1406 is substituted with glycine.

[0913] In accordance with some embodiments the class 5 peptide represents a further modification of the peptide wherein in addition to the N-terminal deletion, the phenylalanine at position 6 of the native glucagon peptide is modified, e.g., to comprise a hydroxyl group in place of the N-terminus amino group. In a further embodiment the natural carboxylic acid of the C-terminal amino acid is replaced with a charge-neutral group, such as an amide or ester.

[0914] In accordance with some embodiments, Class 5 peptides have been prepared wherein the first three to five amino acids of native glucagon have been deleted, the amino acid at position 9, relative to the native glucagon peptide, has been substituted with an amino acid selected from the group consisting of glutamic acid, homoglutamic acid, β-homoglutamic acid, a sulfonic acid derivative of cysteine, or an alkylcarboxylate derivative of cysteine having the structure of:

[chemical structure]

[0915] wherein X₅ is C₁-C₄ alkyl, C₂-C₄ alkenyl, or C₂-C₄ alkynyl, and the alpha-helix structure in the C-terminal portion of glucagon (around amino acids 12-29 according to the amino acid numbering of wild type glucagon) is stabilized, e.g., via a lactam bridge is formed between the side chains of amino acids 12 and 16 or between amino acids 16 and 20, relative to the native glucagon peptide. Examples of amino acid pairings that are capable of covalently bonding to form a seven-atom linking bridge are detailed through-out this disclosure. In some embodiments, the sulfonic acid derivative of cysteine is cysteic acid or homocysteic acid.

[0916] In some embodiments a class 5 is provided comprising an amino acid sequence selected from the group consisting of SEQ ID NO: 1405, SEQ ID NO: 1406, SEQ ID NO: 1407, or SEQ ID NO: 1408, wherein said peptide comprises a lactam ring formed between the side chains of amino acids 7 and 11 for SEQ ID NO: 1405, between 11 and 15 for SEQ ID NO: 1406, between positions 15 and 19 for SEQ ID NO: 1407 and between positions 19 and 24 for SEQ ID NO: 1408, each of said sequences being further modified to comprise a hydrophilic moiety covalently bound to the peptide. More particularly, in some embodiments each of the lactam bearing class 5 peptide are modified by covalent attachment of a polyethylene glycol chain. For example, for a class 5 peptide comprising SEQ ID NO: 1405, the peptide is pegylated at a position selected from the group consisting of 12, 15, 16, 19 and 24; for a class 5 peptide comprising SEQ ID NO: 1406, the peptide is pegylated at a position selected from the group consisting of 12, 16, 19 and 24; for a class 5 peptide comprising SEQ ID NO: 1407, the peptide is pegylated at a position selected from the group consisting of 11, 12, 16 and 24; for class 5 peptide comprising SEQ ID NO: 1408, the peptide is pegylated at a position selected from the group consisting of 11, 12, 15 and 16. In accordance with some embodiments a class 5 peptide comprising SEQ ID NO: 1447 or SEQ ID NO: 1448 is provided wherein the petide is pegylated at a position selected from the group consisting of 12, 16, 19 and 24, relative to the SEQ ID NO: 1447 or SEQ ID NO: 1448 sequence. In a further embodiment the peptide of SEQ ID NO: 1447 or SEQ ID NO: 1448 is further modified by the addition of the sequence of SEQ ID NO: 1421 to the carboxy terminus of the peptide.

[0917] As detailed above in certain aspects Class 5 peptides are provided wherein the first five amino acids of native glucagon have been deleted, the amino group of the N-terminal amino acid (phenylalanine) has been replaced with a hydroxyl group (i.e., the first amino acid is phenyl-lactic acid) and the side chains of one or more amino acid pairs selected from positions 12 and 16, 16 and 20, 20 and 24, and 24 and 28 are linked to one another, thus stabilizing the Class 5 peptide alpha helix.

[0918] In accordance with some embodiments a class 5 peptide is provided comprising the sequence of SEQ ID NO: 1402 that is modified by a substitution of the serine residue at position 11 of SEQ ID NO: 1402 (position 16 according to the amino acid numbering of native glucagon) with an amino acid selected from the group consisting of glutamic acid, glutamine, homoglutamic acid, homocysteic acid, threonine or glycine. In accordance with some embodiments the serine residue at position 11 of SEQ ID NO: 1402 is substituted with an amino acid selected from the group consisting of glutamic acid, glutamine, homoglutamic acid and homocysteic acid, and in some embodiments the serine residue is substituted with glutamic acid. In accordance with some embodiments the class 5 peptide comprises the sequence of SEQ ID NO: 1438.

[0919] In some embodiments a class 5 peptide is provided wherein an intramolecular bridge is formed between two amino acid side chains to stabilize the three dimensional structure of the carboxy terminus of the peptide of SEQ ID NO: 1402. More particularly, the side chains of one or more amino acids selected from amino acid pairs 7 and 11, 11 and 15, 15 and 19 or 19 and 23 of SEQ ID NO: 1402 are linked to one another, thus stabilizing the alpha helix in the C-terminal portion. The two side chains can be linked to one another through hydrogen-bonding, ionic interactions (such as the formation of salt bridges), or by covalent bonds. In accordance with some embodiments the size of the linker is 7-9 atoms, and in some embodiments the size of the linker is 8 atoms. In some embodiments the class 5 peptide is selected from the group consisting of SEQ ID NO: 1405, SEQ ID NO: 1406, SEQ ID NO: 1407 and SEQ ID NO: 1408. In some embodiments the C-terminal amino acid of the class 5 peptide have an amide group substituting for the carboxylic acid group that is present on the native amino acid.

[0920] In accordance with some embodiments class 5 peptide is provided wherein the analog comprises an amino acid sequence of SEQ ID NO: 1409. In some embodiments the three dimensional structure of the carboxy terminus of the peptide of SEQ ID NO: 1409 is stabilized by the formation of covalent bonds between the side chains of the peptide. In some embodiments two amino acid side chains are bound to one another to form a lactam ring. The size of the lactam ring can vary depending on the length of the amino acid side chains, and in some embodiments the lactam is formed by linking the side chains of a lysine amino acid to a glutamic acid side chain. In some embodiments the C-terminal amino acid of the class 5 peptides have an amide group substituting for the carboxylic acid group that is present on the native amino acid.

[0921] The order of the amide bond in the lactam ring can be reversed (e.g., a lactam ring can be formed between the side chains of a Lys12 and a Glu16 or alternatively between a Glu 12 and a Lys16). In accordance with some embodiments a glucagon analog of SEQ ID NO: 1409 is provided wherein at least one lactam ring is formed between the side chains of an amino acid pair selected from the group consisting of amino acid pairs 7 and 11, 11 and 15, 15 and 19 or 19 and 23 of SEQ ID NO: 1409. In some embodiments a class 5 peptide is provided wherein the peptide comprises the sequence of SEQ ID NO: 1410, said sequence further comprising an intramolecular lactam bridge formed between amino acid positions 7 and 11, or between amino acid positions 11 and 15, or between amino acid positions 15 and 19 of SEQ ID NO: 1410. In some embodiments a class 5 peptide is provided wherein the peptide comprises the sequence of SEQ ID NO: 1411, said sequence further comprising an intramolecular lactam bridge formed between amino acid positions 7 and 11, or between amino acid positions 11 and 15 of SEQ ID NO: 1411. In some embodiments the class 5 peptide comprises the sequence of SEQ ID NO: 1417.

[0922] Additional class 5 peptide are provided comprising derivatives of SEQ ID NO: 1405, wherein the aspartic acid at position 10 of SEQ ID NO: 1405 (position 15 of native glucagon) has been substituted with glutamic acid, an amino acid of the general structure:

[chemical structure]

[0923] wherein X₆ is C₁-C₃ alkyl, C₂-C₃ alkene or C₂-C₃ alkynyl, and in some embodiments X₆ is C₁-C₃ alkyl, and in another embodiment X₆ is C₂ alkyl. In some embodiments a Class 5 peptide derivative of SEQ ID NO: 1409 is provided wherein position 10 of SEQ ID NO: 1409 (position 15 of native glucagon) is substituted with an amino acid selected from the group consisting of glutamic acid, cysteic acid, homocysteic acid and homoglutamic acid. In a further embodiment position 10 of SEQ ID NO: 1409 is substituted with an amino acid selected from the group consisting of cysteic acid or homocysteic acid. In some embodiments a Class 5 peptide derivative of SEQ ID NO: 1406, SEQ ID NO: 1407 or SEQ ID NO: 1408 is provided wherein position 10 of SEQ ID NO: 1406, SEQ ID NO: 1407 or SEQ ID NO: 1408 is substituted with an amino acid selected from the group consisting of glutamic acid, cysteic acid, homocysteic acid and homoglutamic acid. In some embodiments the C-terminal amino acid of a class 5 peptide have an amide group substituting for the carboxylic acid group that is present on the native amino acid.

[0924] In some embodiments an amino acid of class 5 peptide is substituted with at least one cysteine residue, wherein the side chain of the cysteine residue is further modified with a thiol reactive reagent, including for example, maleimido, vinyl sulfone, 2-pyridylthio, haloalkyl, and haloacyl. These thiol reactive reagents may contain carboxy, keto, hydroxyl, and ether groups as well as other hydrophilic moieties such as polyethylene glycol units. In an alternative embodiment, an amino acid of a class 5 peptide is substituted with lysine, and the side chain of the substituting lysine residue is further modified using amine reactive reagents such as active esters (succinimido, anhydride, etc) of carboxylic acids or aldehydes of hydrophilic moieties such as polyethylene glycol. In accordance with some embodiments the lysine residue corresponding to position 7 of the peptide of SEQ ID NO: 1405 is substituted with arginine and a single lysine substitution is inserted for one of the amino acids corresponding to position 12, 15, 16, 19 and 24 of SEQ ID NO: 1405.

[0925] In another embodiment the methionine residue corresponding to position 22 of the class 5 peptides disclosed herein is changed to leucine or norleucine to prevent oxidative degradation of the peptide.

[0926] Moreover class 5 peptides, in some aspects, also encompass amino acid substitutions at positions that are known not to be critical to the function of the glucagon analog. In some embodiments the substitutions are conservative amino acid substitutions at one, two or three positions selected from the group consisting of 2, 5, 6, 7, 8, 9, 12, 13, 14, 15, 16, 19, 22, 23 or 24. In some embodiments the amino acids corresponding to positions 16, 17, 20, 21, 24 or 29 of the native glucagon peptide, and more particularly at position 21 and/or 24 relative to native glucagon are substituted with cysteine or lysine, wherein a PEG chain is covalently attached to the substituted cysteine or lysine residue.

[0927] In accordance with some embodiments, a class 5 peptide is provided comprising a sequence consisting of SEQ ID NO: 1409, further modified by one or more additional amino acid substitutions at positions corresponding to positions 11, 12, 15, 16, 19 and/or 24 of the peptide (including for example substitution with cysteine), wherein the amino acid substitution comprises an amino acid having a side chain suitable for crosslinking with hydrophilic moieties, including for example, PEG. Native glucagon can be substituted with a naturally occurring amino acid or a synthetic (non-naturally occurring) amino acid. Synthetic or non-naturally occurring amino acids refer to amino acids that do not naturally occur in vivo but which, nevertheless, can be incorporated into the peptide structures described herein. In some embodiments a Class 5 peptide is provided wherein the peptide comprises the sequence of SEQ ID NO: 1409 and further comprises a polyethylene glycol chain bound to position 16 or 19 of the peptide. In a further embodiment the C-terminus of the glucagon analog is modified to replace the carboxylic acid group with an amide group.

[0928] In accordance with some embodiments a class 5 peptide is provided comprising a glucagon analog selected from the group consisting of:

(SEQ ID NO: 1439)

R₁-Phe- Thr-Ser-Xaa-Tyr-Ser-Lys-Tyr-Leu-Xaa-Glu-
Arg-Arg-Ala-Gln-Asp-Phe-Val-Gln-Trp-Leu-Xaa-Asn-
Thr-R₂

(SEQ ID NO: 1413)

R₁-Phe-Thr-Ser-Xaa-Tyr-Ser-Lys-Tyr-Leu-Asp-Glu-
Arg-Arg-Ala-Gln-Xaa-Phe-Val-Gln-Trp-Leu- Xaa-Asn-
Thr-R₂,

(SEQ ID NO: 1414)

R₁-Phe-Thr-Ser-Xaa-Tyr-Ser-Lys-Tyr-Leu-Asp-Glu-
Arg-Arg-Ala-Gln-Asp-Phe-Val-Xaa-Trp-Leu-Xaa-Asn-
Thr -R₂
and

(SEQ ID NO: 1412)

R₁-Phe- Thr-Ser-Xaa-Tyr-Ser-Lys-Tyr-Leu-Asp-Glu-
Arg-Arg-Ala-Gln-Xaa-Phe-Val-Xaa-Trp-Leu- Xaa-Asn-
Thr -R₂,

[0929] wherein Xaa at position 4=aspartic acid, glutamic acid, cysteic acid or homocysteic acid, Xaa at position 10=Asp, Glu, cysteic acid, homoglutamic acid and homocysteic acid, Xaa at position 16 is Asp, Cys, Orn, homocysteine or acetyl phenylalanine and the Xaa at position 19 is Gln, Cys, Orn, homocysteine and acetyl phenylalanine, Xaa at position 22=Met, Leu or Nle, R₁ is OH or NH₂, and R₂ is Gly Pro Ser Ser Gly Ala Pro Pro Pro Ser (SEQ ID NO: 1421), Gly Pro Ser Ser Gly Ala Pro Pro Pro Ser Xaa (SEQ ID NO: 1450; wherein Xaa is Cys, Orn, homocystein or acetyl phenyalanine), COOH or CONH₂, wherein the peptide is optionally pegylated at position 16 of SEQ ID NO: 1413, position 19 of SEQ ID NO: 1414 and at positions 16 and 19 of SEQ ID NO: 1412. In some embodiments the Thr at position 24 of SEQ ID NOs: 1412-1414 and 1439 is substituted with Gly. In accordance with some embodiments the peptide comprises the sequence of SEQ ID NO: 13 or SEQ ID NO: 1414, wherein R₁ is OH. In accordance with some embodiments the peptide comprises the sequence of SEQ ID NO: 1413 or SEQ ID NO: 1414, wherein R₁ is OH and R₂ is CONH₂. In accordance with some embodiments the peptide comprises the sequence of SEQ ID NO: 1413 or SEQ ID NO: 1414, wherein R₁ is OH, R₂ is CONH₂ and the threonine at position 24 is substituted with glycine.

[0930] In some embodiments, a class 5 peptide is further modified to comprise one or more amino acids of native GLP-1 by substitution of the native glucagon residue(s) at corresponding amino acid positions. For example, the class 5 peptide may comprise one or more amino acid substitutions at any of positions 2, 3, 17, 18, 21, 23, and 24 (according to the amino acid numbering of native glucagon). In a specific embodiment, the class 5 peptide is modified by one or more of the following amino acid substitutions: Ser2 is replaced with Ala, Gln3 is replaced with Glu, Arg17 is replaced with Gln, Arg at position 18 is replaced with Ala, Asp at position 21 is replaced with Glu, Val at position 23 is replaced with Ile, and Gln at position 24 is replaced with Ala (amino acid positions are in accordance with the native glucagon sequence). In a specific embodiment, the class 5 peptide is modified by replacing Ser2 with Ala and Gln3 with Glu (according to the amino acid numbering of native glucagon). In another specific embodiment, the class 5 peptide is modified with all of the following amino acid substitutions: Arg17 is replaced with Gln, Arg at position 18 is replaced with Ala, Asp at position 21 is replaced with Glu, Val at position 23 is replaced with Ile, and Gln at position 24 is replaced with Ala (amino acid numbering according to native glucagon). In yet another specific embodiment, the class 5 peptide is modified to comprise just Glu at position 21 (according to the numbering of SEQ ID NO: 1401). Accordingly, the class 5 peptide can comprise the amino acid sequence of any of SEQ ID NOs: 1460-1470, 1473-1478, 1480-1488, 1490-1496, 1503, 1504, 1506, and 1514-1518.

[0931] Also provided herein is a class 5 peptide or conjugate thereof comprising (1) a stabilized alpha helix through means described herein (e.g., through an intramolecular bridge, or incorporation of one or more alpha, alpha-di-substituted amino acids, or an acidic amino acid at position 16 (according to the numbering of SEQ ID NO:1401), or a combination thereof; (2) a C-terminal amide or ester in place of a C-terminal carboxylate, and (3) a general structure of A-B-C,

[0932] wherein A is selected from the group consisting of

[0933] (i) phenyl lactic acid (PLA);

[0934] (ii) an oxy derivative of PLA; and

[0935] (iii) a peptide of 2 to 6 amino acids in which two consecutive amino acids of the peptide are linked via an ester or ether bond;

[0936] wherein B represents amino acids p to 26 of SEQ ID NO: 1401, wherein p is 3, 4, 5, 6, or 7, optionally comprising one or more amino acid modifications, as described herein, including, for example, any of the modifications described for Class 5 peptides. For instance the one or more modification may be selected from the group consisting of:

[0937] (iv) Asp at position 9 (according to the amino acid numbering of SEQ ID NO: 1401) is substituted with a Glu, a sulfonic acid derivative of Cys, homoglutamic acid, β-homoglutamic acid, or an alkylcarboxylate derivative of cysteine having the structure of:

[chemical structure]

[0938] wherein X₅ is C₁-C₄ alkyl, C₂-C₄ alkenyl, or C₂-C₄ alkynyl;

[0939] (v) substitution of one or two amino acids at positions 10, 20, and 24, (according to the amino acid numbering of SEQ ID NO: 1401) with an amino acid covalently attached to an acyl or alkyl group via an ester, ether, thioether, amide, or alkyl amine linkage;

[0940] (vi) substitution of one or two amino acids at positions 16, 17, 20, 21, and 24 (according to the amino acid numbering of SEQ ID NO: 1401) with an amino acid selected from the group consisting of: Cys, Lys, ornithine, homocysteine, and acetyl-phenylalanine (Ac-Phe), wherein the amino acid of the group is covalently attached to a hydrophilic moiety;

[0941] (vii) Asp at position 15 (according to the numbering of SEQ ID NO: 1401) is substituted with cysteic acid, glutamic acid, homoglutamic acid, and homocysteic acid;

[0942] (viii) Ser at position 16 (according to the numbering of SEQ ID NO: 1401) is substituted with cysteic acid, glutamic acid, homoglutamic acid, and homocysteic acid;

[0943] (ix) Arg at position 17 is replaced with Gln, Arg at position 18 is replaced with Ala, Asp at position 21 is replaced with Glu, Val at position 23 is replaced with Ile, and Gln at position 24 is replaced with Ala (according to amino acid numbering of SEQ ID NO: 1401);

[0944] (x) Ser at position 16 is replaced with Glu, Gln at position 20 is replaced with Glu, or Gln at position 24 is replaced with Glu (according to the amino acid numbering of SEQ ID NO: 1401);

[0945] wherein C (of the general structure of A-B-C) is selected from the group consisting of:

[0946] (vii) X;

[0947] (viii) X-Y;

[0948] (ix) X-Y-Z;

[0949] (x) X-Y-Z-R10;

[0950] wherein X is Met, Leu, or Nle; Y is Asn or a charged amino acid; Z is Thr, Gly, Cys, Lys, ornithine (Orn), homocysteine, acetyl phenylalanine (Ac-Phe), or a charged amino acid; wherein R10 is selected from a group consisting of SEQ ID NOs: 1421, 1426, 1427, and 1450.

[0951] In a specific aspect, the peptide comprises an oxy derivative of PLA. As used herein “oxy derivative of PLA” refers to a compound comprising a modified structure of PLA in which the hydroxyl group has been replaced with O—R₁₁, wherein R₁₁ is a chemical moiety. In this regard, the oxy derivative of PLA can be, for example, an ester of PLA or an ether of PLA.

[0952] Methods of making oxy derivatives of PLA are known in the art. For example, when the oxy derivative is an ester of PLA, the ester may be formed by upon reaction of the hydroxyl of PLA with a carbonyl bearing a nucleophile. The nucleophile can be any suitable nucleophile, including, but not limited to an amine or hydroxyl. Accordingly, the ester of PLA can comprise the structure of Formula IV:

[chemical structure]

[0953] wherein R7 is an ester formed upon reaction of the hydroxyl of PLA with a carbonyl bearing a nucleophile.

[0954] The carbonyl bearing a nucleophile (which reacts with the hydroxyl of PLA to form an ester) can be, for example, a carboxylic acid, a carboxylic acid derivative, or an activated ester of a carboxylic acid. The carboxylic acid derivative can be, but is not limited to, an acyl chloride, an acid anhydride, an amide, an ester, or a nitrile. The activated ester of a carboxylic acid can be, for example, N-hydroxysuccinimide (NHS), tosylate (Tos), a carbodiimide, or a hexafluorophosphate. In some embodiments, the carbodiimide is 1,3-dicyclohexylcarbodiimide (DCC), 1,1′-carbonyldiimidazole (CDI), 1-ethyl-3-(3-dimethylaminopropyl)carbodiimide hydrochloride (EDC), or 1,3-diisopropylcarbodiimide (DICD). In some embodiments, the hexafluorophosphate is selected from a group consisting of hexafluorophosphate benzotriazol-1-yl-oxy-tris(dimethylamino)phosphonium hexafluorophosphate (BOP), benzotriazol-1-yl-oxytripyrrolidinophosphonium hexafluorophosphate (PyBOP), 2-(1H-7-azabenzotriazol-1-yl)-1,1,3,3-tetramethyl uronium hexafluorophosphate (HATU), and o-benzotriazole-N,N,N′,N′-tetramethyl-uronium-hexafluoro-phosphate (HBTU).

[0955] Methods of making ethers from reaction with a hydroxyl group (e.g., the hydroxyl of PLA) also are known in the art. For example, the hydroxyl group of PLA may be reacted with a halogenated alkyl or tosylated alkyl alcohol to form an ether bond.

[0956] In a specific embodiment, the chemical moiety bound to PLA via an oxygen-containing bond (e.g., via an ester or ether bond) is a polymer (e.g., a polyalkylene glycol), a carbohydrate, an amino acid, a peptide, or a lipid, e.g., a fatty acid or a steroid.

[0957] In a specific embodiment, the chemical moiety is an amino acid, which, optionally, is a part of a peptide, such that Formula IV is a depsipeptide. In this regard, PLA may be at a position other than the N-terminal amino acid residue of the peptide, such that the peptide comprises one or more (e.g., 1, 2, 3, 4, 5, 6, or more) amino acids N-terminal to the PLA residue. For example, the peptide can comprise PLA at position n, wherein n is 2, 3, 4, 5, or 6 of the peptide.

[0958] The amino acids N-terminal to the PLA residue may be synthetic or naturally-occurring. In a specific embodiment, the amino acids which are N-terminal PLA are naturally-occurring amino acids. In some embodiments, the amino acids which are N-terminal to PLA are the N-terminal amino acids of native glucagon. For example, the peptide can comprise at the N-terminus the amino acid sequence of any of SEQ ID NOs: 1452-1456, wherein PLA is linked to threonine via an ester bond:

SEQ ID NO: 1452

His-Ser-Gln-Gly-Thr-PLA

SEQ ID NO: 1453

Ser-Gln-Gly-Thr-PLA

SEQ ID NO: 1454

Gln-Gly-Thr-PLA

SEQ ID NO: 1455

Gly-Thr-PLA

SEQ ID NO: 1456

Thr-PLA

[0959] In an alternative embodiment, one or more of the N-terminal amino acids may be substituted with an amino acid other than the amino acid of native glucagon. For example, when the peptide comprises PLA as the amino acid at position 5 or 6, the amino acid at position 1 and/or position 2 may be an amino acid which reduces susceptibility to cleavage by dipeptidyl peptidase IV. More particularly, in some embodiments, position 1 of the peptide is an amino acid selected from the group consisting of D-histidine, alpha, alpha-dimethyl imidiazole acetic acid (DMIA), N-methyl histidine, alpha-methyl histidine, imidazole acetic acid, desaminohistidine, hydroxyl-histidine, acetyl-histidine and homo-histidine. More particularly, in some embodiments, position 2 of the antagonist/agonist peptide is an amino acid selected from the group consisting of D-serine, D-alanine, valine, glycine, N-methyl serine, N-methyl alanine, and aminoisobutyric acid (AIB). Also, for example, when the peptide comprises PLA as the amino acid at position 4, 5, or 6, the amino acid at position 3 of the peptide may be glutamic acid, as opposed to the native glutamine residue of native glucagon. In an exemplary embodiment of the invention, the peptide comprises at the N-terminus the amino acid sequence of any of SEQ ID NOs: 1457-1459.

[0960] With respect to the peptides comprising a compound of Formula IV, the polymer may be any polymer, provided that it can react with the hydroxyl group of PLA. The polymer may be one that naturally or normally comprises a carbonyl bearing a nucleophile. Alternatively, the polymer may be one which was derivatized to comprise the carbonyl bearing the carbonyl. The polymer may be a derivatized polymer of any of: polyamides, polycarbonates, polyalkylenes and derivatives thereof including, polyalkylene glycols, polyalkylene oxides, polyalkylene terepthalates, polymers of acrylic and methacrylic esters, including poly(methyl methacrylate), poly(ethyl methacrylate), poly(butylmethacrylate), poly(isobutyl methacrylate), poly(hexylmethacrylate), poly(isodecyl methacrylate), poly(lauryl methacrylate), poly(phenyl methacrylate), poly(methyl acrylate), poly(isopropyl acrylate), poly(isobutyl acrylate), and poly(octadecyl acrylate), polyvinyl polymers including polyvinyl alcohols, polyvinyl ethers, polyvinyl esters, polyvinyl halides, poly(vinyl acetate), and polyvinylpyrrolidone, polyglycolides, polysiloxanes, polyurethanes and co-polymers thereof, celluloses including alkyl cellulose, hydroxyalkyl celluloses, cellulose ethers, cellulose esters, nitro celluloses, methyl cellulose, ethyl cellulose, hydroxypropyl cellulose, hydroxy-propyl methyl cellulose, hydroxybutyl methyl cellulose, cellulose acetate, cellulose propionate, cellulose acetate butyrate, cellulose acetate phthalate, carboxylethyl cellulose, cellulose triacetate, and cellulose sulphate sodium salt, polypropylene, polyethylenes including poly(ethylene glycol), poly(ethylene oxide), and poly(ethylene terephthalate), and polystyrene.

[0961] The polymer can be a biodegradable polymer, including a synthetic biodegradable polymer (e.g., polymers of lactic acid and glycolic acid, polyanhydrides, poly(ortho)esters, polyurethanes, poly(butic acid), poly(valeric acid), and poly(lactide-cocaprolactone)), and a natural biodegradable polymer (e.g., alginate and other polysaccharides including dextran and cellulose, collagen, chemical derivatives thereof (substitutions, additions of chemical groups, for example, alkyl, alkylene, hydroxylations, oxidations, and other modifications routinely made by those skilled in the art), albumin and other hydrophilic proteins (e.g., zein and other prolamines and hydrophobic proteins)), as well as any copolymer or mixture thereof. In general, these materials degrade either by enzymatic hydrolysis or exposure to water in vivo, by surface or bulk erosion.

[0962] The polymer can be a bioadhesive polymer, such as a bioerodible hydrogel described by H. S. Sawhney, C. P. Pathak and J. A. Hubbell in Macromolecules, 1993, 26, 581-587, the teachings of which are incorporated herein, polyhyaluronic acids, casein, gelatin, glutin, polyanhydrides, polyacrylic acid, alginate, chitosan, poly(methyl methacrylates), poly(ethyl methacrylates), poly(butylmethacrylate), poly(isobutyl methacrylate), poly(hexylmethacrylate), poly(isodecyl methacrylate), poly(lauryl methacrylate), poly(phenyl methacrylate), poly(methyl acrylate), poly(isopropyl acrylate), poly(isobutyl acrylate), and poly(octadecyl acrylate).

[0963] In some embodiments, the polymer is a water-soluble polymer. Suitable water-soluble polymers are known in the art and include, for example, polyvinylpyrrolidone, hydroxypropyl cellulose (HPC; Klucel), hydroxypropyl methylcellulose (HPMC; Methocel), nitrocellulose, hydroxypropyl ethylcellulose, hydroxypropyl butylcellulose, hydroxypropyl pentylcellulose, methyl cellulose, ethylcellulose (Ethocel), hydroxyethyl cellulose, various alkyl celluloses and hydroxyalkyl celluloses, various cellulose ethers, cellulose acetate, carboxymethyl cellulose, sodium carboxymethyl cellulose, calcium carboxymethyl cellulose, vinyl acetate/crotonic acid copolymers, poly-hydroxyalkyl methacrylate, hydroxymethyl methacrylate, methacrylic acid copolymers, polymethacrylic acid, polymethylmethacrylate, maleic anhydride/methyl vinyl ether copolymers, poly vinyl alcohol, sodium and calcium polyacrylic acid, polyacrylic acid, acidic carboxy polymers, carboxypolymethylene, carboxyvinyl polymers, polyoxyethylene polyoxypropylene copolymer, polymethylvinylether co-maleic anhydride, carboxymethylamide, potassium methacrylate divinylbenzene co-polymer, polyoxyethyleneglycols, polyethylene oxide, and derivatives, salts, and combinations thereof.

[0964] In a specific embodiment, the polymer is a polyalkylene glycol, including, for example, polyethylene glycol (PEG).

[0965] The carbohydrate may be any carbohydrate provided that it comprises or is made to comprise a carbonyl with an alpha leaving group. The carbohydrate, for example, may be one which has been derivatized to comprise a carbonyl with an alpha leaving group. In this regard, the carbohydrate may be a derivatized form of a monosaccharide (e.g., glucose, galactose, fructose), a disaccharide (e.g., sucrose, lactose, maltose), an oligosaccharide (e.g., raffinose, stachyose), a polysaccharide (a starch, amylase, amylopectin, cellulose, chitin, callose, laminarin, xylan, mannan, fucoidan, galactomannan.

[0966] The lipid may be any lipid comprising a carbonyl with an alpha leaving group. The lipid, for example, may be one which is derivatized to comprise the carbonyl. In this regard, the lipid, may be a derivative of a fatty acid (e.g., a C4-C30 fatty acid, eicosanoid, prostaglandin, leukotriene, thromboxane, N-acyl ethanolamine), glycerolipid (e.g., mono-, di-, tri-substituted glycerols), glycerophospholipid (e.g., phosphatidylcholine, phosphatidylinositol, phosphatidylethanolamine, phosphatidylserine), sphingolipid (e.g., sphingosine, ceramide), sterol lipid (e.g., steroid, cholesterol), prenol lipid, saccharolipid, or a polyketide.

[0967] oil, wax, cholesterol, sterol, fat-soluble vitamin, monoglyceride, diglyceride, triglyceride, a phospholipid.

[0968] In some embodiments, R7 has a molecular weight of about 100 kDa or less, e.g., about 90 kDa or less, about 80 kDa or less, about 70 kDa or less, about 60 kDa or less, about 50 kDa or less, about 40 kDa or less. Accordingly, R7 can have a molecular weight of about 35 kDa or less, about 30 kDa or less, about 25 kDa or less, about 20 kDa or less, about 15 kDa or less, about 10 kDa or less, about 5 kDa or less, or about 1 kDa.

[0969] In an alternative embodiment, the peptide comprising the general structure of A-B-C comprises, as A, a peptide of 2 to 6 amino acids in which two consecutive amino acids of the peptide of A are linked via an ester or ether bond. The ester or ether bond may be, e.g., between amino acids 2 and 3, 3 and 4, 4 and 5, or 5 and 6. Optionally the peptide of A may be further modified by covalent linkage to another chemical moiety including linkage to a polymer (e.g. a hydrophilic polymer), alkylation, or acylation.

[0970] In a specific embodiment, the above-described class 5 peptide comprising PLA is modified to comprise an oxy derivative of PLA, such as, for instance, an ester of PLA or an ether of PLA. For example, the class 5 peptide can comprise the amino acid sequence of any of SEQ ID NOs: 1402, 1405-1420, 1422-1425, 1432-1436, 1438, 1439, 1445, 1446, and 1451, wherein the PLA is linked via an ester or ether bond to an amino acid, peptide, polymer, acyl group, or alkyl group. The amino acid, peptide, polymer, acyl group, or alkyl group may be any of those described herein. In the case that the PLA is linked via an ester bond to an amino acid or peptide, the class 5 peptide may be considered as a depsipeptide.

[0971] Also, in another specific embodiment, the above-described class 5 peptide which lacks PLA is modified to comprise at least one ester bond or ether bond between two consecutive amino acids which are N-terminal to the amino acid at position 7 (according to the numbering of native glucagon). In a specific embodiment, the class 5 peptide comprises at least one ester or ether bond between the two consecutive amino acids. In a more specific embodiment, the Class 5 peptide comprises the N-terminal 6 amino acids of SEQ ID NO: 1401 and two consecutive amino acids of the N-terminal 6 amino acids are linked via an ester or ether bond.

[0972] The peptide of A may comprise any amino acids, synthetic or naturally occurring, provided that at least two consecutive amino acids are linked via an ester or ether bond. In a specific embodiment, the peptide of A comprises amino acids of native glucagon. The amino acid at position 1 and/or position 2 may be an amino acid which reduces susceptibility to cleavage by dipeptidyl peptidase IV. For instance, the peptide of A can comprise at position 1 an amino acid selected from the group consisting of D-histidine, alpha, alpha-dimethyl imidiazole acetic acid (DMIA), N-methyl histidine, alpha-methyl histidine, imidazole acetic acid, desaminohistidine, hydroxyl-histidine, acetyl-histidine and homo-histidine. More particularly, in some embodiments, position 2 of the peptide of A is an amino acid selected from the group consisting of D-serine, D-alanine, valine, glycine, N-methyl serine, N-methyl alanine, and aminoisobutyric acid (AIB). Also, for example, the amino acid at position 3 of the peptide of A may be glutamic acid, as opposed to the native glutamine residue of native glucagon. Accordingly, the peptide of general structure of A-B-C can comprise an amino acid sequence of:

(SEQ ID NO: 1507)

Xaa₁-Xaa₂-Xaa₃-Thr-Gly-Phe;

(SEQ ID NO: 1508)

Xaa₂-Xaa₃-Thr-Gly-Phe;
or

(SEQ ID NO: 1509)

Xaa₃-Thr-Gly-Phe;

[0973] wherein Xaa₁ is selected from a group consisting of: His, D-histidine, alpha, alpha-dimethyl imidiazole acetic acid (DMIA), N-methyl histidine, alpha-methyl histidine, imidazole acetic acid, desaminohistidine, hydroxyl-histidine, acetyl-histidine and homo-histidine; Xaa₂ is selected from a group consisting of: Ser, D-serine, D-alanine, valine, glycine, N-methyl serine, N-methyl alanine, and aminoisobutyric acid (AIB); and Xaa₃ is Gln or Glu.

[0974] In some embodiments, B is modified by up to three amino acid modifications. For example, B, which represents native amino acid sequence of SEQ ID NO: 1401 is modified by one or more conservative amino acid modifications.

[0975] In another embodiment, B comprises one or more amino acid modifications selected from the group consisting of (iv) to (x), as described herein. In a specific embodiment, B comprises one or both of the amino acid modifications (v) and (vi). In a further specific embodiment, B comprises one or a combination of amino acid modifications selected from the group consisting of (iv), (vii), (viii), (ix), and (x), in addition to (v) and (vi).

[0976] As described herein, the peptide comprising the general structure A-B-C may comprise one or more charged amino acids at the C-terminus, e.g., as Y and/or Z, as described herein. Alternatively or additionally, the peptide comprising the general structure A-B-C may further comprise one to two charged amino acids C-terminal to Z, when C comprises X-Y-Z. The charged amino acids can be, for example, one of Lys, Arg, His, Asp, and Glu. In a specific embodiment, Y is Asp.

[0977] In some embodiments, the peptide comprising the general structure A-B-C comprises a hydrophilic moiety covalently bound to an amino acid residue at position 1, 16, 20, 21, or 24 (according to the amino acid numbering of SEQ ID NO: 1401), or at the N- or C-terminal residue of the peptide comprising the general structure A-B-C. In a specific embodiment, the hydrophilic moiety is attached to a Cys residue of the peptide comprising the general structure A-B-C. In this regard, the amino acid at position 16, 21, 24, or 29 of native glucagon (SEQ ID NO: 1401) may be substituted with a Cys residue. Alternatively, a Cys residue comprising a hydrophilic moiety may be added to the C-terminus of the peptide comprising the general structure A-B-C as position 30 or as position 40, e.g., when the peptide comprising the general structure A-B-C comprises a C-terminal extension (positions according to the amino acid numbering of SEQ ID NO: 1401). Alternatively, the hydrophilic moiety may be attached to the PLA of the peptide comprising the general structure A-B-C via the hydroxyl moiety of PLA. The hydrophilic moiety can be any of those described herein, including, for example, polyethylene glycol.

[0978] In a specific aspect, the peptide comprising the general structure A-B-C comprises a stabilized alpha helix by virtue of incorporation of an intramolecular bridge. In some embodiments, the intramolecular bridge is a lactam bridge. The lactam bridge may be between the amino acids at positions 9 and 12, the amino acids at positions 12 and 16, the amino acids at positions 16 and 20, the amino acids at positions 20 and 24, or the amino acids at positions 24 and 28 (according to the amino acid numbering of SEQ ID NO: 1401). In a specific embodiment, the amino acids at positions 12 and 16 or at positions 16 and 20 (according to the amino acid numbering of SEQ ID NO: 1401) are linked via a lactam bridge. Other positions of the lactam bridge are contemplated.

[0979] Additionally or alternatively, the peptide comprising the general structure A-B-C can comprise an alpha, alpha di-substituted amino acid at, for example, any of positions 16, 20, 21, or 24 (according to the amino acid numbering of SEQ ID NO: 1401). In some embodiments, the alpha, alpha di-substituted amino acid is AIB. In a specific aspect, the AIB is located at position 16 (according to the numbering of SEQ ID NO: 1401).

[0980] Alternatively or additionally, the peptide comprising the general structure A-B-C may be modified to comprise an acidic amino acid at position 16 (according to the numbering of SEQ ID NO: 1401), which modification enhances the stability of the alpha helix. The acidic amino acid, in some embodiments, is an amino acid comprising a side chain sulfonic acid or a side chain carboxylic acid. In a more specific embodiment, the acidic amino acid is selected from the group consisting of Glu, Asp, homoglutamic acid, a sulfonic acid derivative of Cys, cysteic acid, homocysteic acid, Asp, and an alkylated derivative of Cys having the structure of

[chemical structure]

[0981] wherein X₅ is C₁-C₄ alkyl, C₂-C₄ alkenyl, or C₂-C₄ alkynyl.

[0982] In a specific embodiment, the Class 5 peptide may comprise the amino acid sequence of any of SEQ ID NOs: 1460-1470, 1473-1478, 1480-1488, 1490-1496, 1503, 1504, 1506, and 1514-1518, or comprising the amino acid sequence of any of Peptides 2-6 of Table 1, Peptides 1-8 of Table 2, and Peptides 2-6, 8, and 9 of Table 3.

TABLE 1
Lactam, Cex glucagon(6-39) peptides and glucagon antagonist and
GLP-1 agonist activity

| | | | GLP-1 ECso | Glu ICso |
|---|---|---|---|---|
| | | | (nM) | (nM) |
| 1 | E9, K12, E16 | FTSEYSKYLDERRAQDFVQWLMNTGPSSGAPPPS | 1451 | 762 |
| 2 | E9, K12E16(lactam) | FTSEYSKYLDERRAQDFVQWLMNTGPSSGAPPPS | 63 | 2008 |
| 3 | E9, E16K20(lactam) | FTSEYSKYLDERRAKDFVQWLMNTGPSSGAPPPS | 36 | 42 |
| 4 | D9, K12E16(Lactam) | FTSDYSKYLDERRAQDFVQWLMNTGPSSGAPPPS | 118.7 | 828 |
| 5 | [PLA6, E9, K12E16(Lactam) | PLA- | 6 | 72 |
| | | TSEYSKYLDERRAQDFVQWLMNTGPSSGAPPPS | | |
| 6 | [PLA6, E9, E16K20(Lactam)] | PLA-TSEYSKYLDERRAKDFVQWLMNTGPSSGAPPPS | 20 | 20 |

TABLE 2
Lactam glucagon(1-29, 2-29, 4-29 and 6-29) peptides and
their glucagon antagonist and GLP-1 agonist activity
(PA = partial antagonist)

| | | | Glucagon |
|---|---|---|---|
| | | GLP-1 EC50 | IC50 |
| | | (nM) | (nM) |
| | Glucagon | | 0.2~1.0* |
| | HSQGTFTSDYSKYLDSRRAQDFVQWLMNT | | |
| | GLP-1 (aa 1-30) | 0.02~0.1 | |
| | HAEGTFTSDVSSYLEGQAAKEFIAWlVKGR | | |
| 1 | [PLA6, D9, E16K20(lactam), D28]G(6-29) | 5~25 | 10~30 |
| | PLA TSDYSKYLDERRAKDFVQWLMDT | | |
| 2 | [PLA6, D9, K12E16(Lactam), D28]G(6-29) | 177 | 63 |
| | PLA TSDYSKYLDERRAQDFVQWLMDT | | |
| 3 | [PLA6, D9, E16, K20E24(Lactam), D28]G(6-29) | 239 | 74 |
| | PLA TSDYSKYLDERRAKDFVEWLMDT | | |
| 4 | [PLA6, D9, E16, E24K28(lactam)]G(6~29) | 289 | 22 |
| | PLA TSDYSKYLDERRAQDFVEWLMKT | | |
| 5 | [E9, E16K20(lactam), D28]G(4~29) | 151 | 10~30 |
| | GTFTSEYSKYLDERRAKDFVQWLMDT | | |
| 6 | [E9, E16K20(lactam), D28]G(2~29) | 203 | 49 (PA) |
| | SQGTFTSEYSKYLDERRAKDFVQWLMDT | | |
| 7 | [A2E3, E16K20(Lactam),D28]G(2~29) | 175 | 63 |
| | AEGTFTSEYSKYLDERRAKDFVQWLMDT | | |
| 8 | [A2E3, E16K20(Lactam), D28]G(1~29) | 0.2 | 130 (PA) |
| | HAEGTFTSEYSKYLDERRAKDFVQWLMDT | | |
| 9 | ANK2 (Bayer peptide) | 0.28 | agonist |
| | HSQGTFTSDY ARYLDARRAREFIKWL VRGRG | | |

*EC50 at glucagon receptor

TABLE 3
Profile of Mixed Agonist/Antagonist

| | |
|---|---|
| | Glucagon IC50 |
| GLP-1 EC50 (nM) | (nM) |

Glucagon (6-CEX) Analogs

| | | | | |
|---|---|---|---|---|
| 1 | E9, K12, E16 | FTSEYSKYLDERRAQDFVQWLMNTGPSSGAPPPS | 1451 | 762 |
| 2 | E9, K12E16(lactam) | FTSEYSKYLDERRAQDFVQWLMNTGPSSGAPPPS | 63 | 2008 |
| 3 | E9, E16K20(lactam) | FTSEYSKYLDERRAKDFVQWLMNTGPSSGAPPPS | 36 | 42 |
| 4 | D9, K12E20(lactam) | FTSDYSKYLDERRAQDFVQWLlMNTGPSSGAPPPS | 18 | 828 |
| 5 | [PLA6, E9, K12E20(lactam) | PLA- | 6 | 72 |
| | | TSEYSKYLDERRAQDFVQWLMNTGPSSGAPPPS | | |
| 6 | [PLA6, E9, | PLA- | 20 | 20 |
| | E16K20(Lactam)] | TSEYSKYLDERRAKDFVQWLMNTGPSSGAPPPS | | |

Glucagon D9(6-29) analogs

| | | | | |
|---|---|---|---|---|
| 7 | PLA 6, D9, D28 | PLA- | −700 | tbd |
| | | TSDYSKYLDSRRAQDFVQWLMDT | | |
| 8 | PLA6, D9, | PLA- | 21 | 13 |
| | K12E20(Lactam) | TSDYSKYLDERRAQDFVQWLMDT | | |
| 9 | PLA6, D9, | PLA- | 4 | 6 |
| | E16K20(lactam) | TSDYSKYLDERRAKDFVQWLMDT | | |

[0983] In some embodiments, the peptide comprising the general structure A-B-C is a Class 5 peptide. In a specific embodiment, the peptide exhibits exhibits at least about 50% of the maximum agonism achieved by native GLP-1 at the GLP-1 receptor and at least about 50% inhibition of the maximum response achieved by native glucagon at the glucagon receptor. In another specific embodiment, the peptide exhibits at least about 55%, at least about 60%, at least about 70%, at least about 80%, at least about 90%, at least about 95%, or about 100% of the maximum agonism achieved by native GLP-1 at the GLP-1 receptor. Alternatively or additionally, the peptide may exhibit at least about 55%, at least about 60%, at least about 70%, at least about 80%, at least about 90%, at least about 95%, or about 100% inhibition of the maximum response achieved by native glucagon at the glucagon receptor.

[0984] In some embodiments, a peptide with Class 5 peptide or conjugate thereof, is provided comprising:

[0985] (1) modifications that confer glucagon antagonist activity, including but not limited to:

[0986] (a) substitution of the Phe at position 6 with PLA (according to amino acid numbering of wild type glucagon), optionally with deletion of 1 to 5 amino acids from the N-terminus of wild type glucagon; or

[0987] (b) deletion of 2 to 5 amino acids from the N-terminus of wild type glucagon; optionally with substitution of Asp at position 9 of wild type glucagon with glutamic acid, homoglutamic acid or a sulfonic acid derivative of cysteine (according to amino acid numbering of wild type glucagon);

[0988] and

[0989] (2) modifications that confer GLP-1 agonist activity, including but not limited to:

[0990] (a) insertion or substitution of α, α-disubstituted amino acid within amino acids 12-29 of wild type glucagon, e.g. at one, two, three, four or more of positions 16, 17, 18, 19, 20, 21, 24 or 29 (according to the amino acid numbering of wild type glucagon); or

[0991] (b) introduction of an intramolecular bridge within amino acids 12-29 of wild type glucagon, e.g. a salt bridge or a lactam bridge or another type of covalent bond; or

[0992] (c) substitution of the amino acid at one or more of positions 2, 3, 17, 18, 21, 23, or 24 (according to the amino acid numbering of native glucagon) with the corresponding amino acid of GLP-1, e.g. Ser2 is replaced with Ala, Gln3 is replaced with Glu, Arg17 is replaced with Gln, Arg at position 18 is replaced with Ala, Asp at position 21 is replaced with Glu, Val at position 23 is replaced with Ile, and/or Gln at position 24 is replaced with Ala; or

[0993] (d) other modifications that stabilize the alpha-helix structure around amino acid positions 12-29 according to the amino acid numbering of wild type glucagon;

[0994] and

[0995] (3) other modifications that enhance GLP-1 agonist activity, e.g.
[0996] (a) a C-terminal amide or ester in place of a C-terminal carboxylate; and optionally

[0997] (4) one or more of the following modifications:

[0998] (a) covalent attachment to a hydrophilic moiety, such as polyethylene glycol, e.g. at the N-terminus, or at position 6, 16, 17, 20, 21, 24, 29, 40 or at the C-terminal amino acid; and/or

[0999] (b) acylation or alkylation; and optionally

[1000] (5) one or more of the following additional modifications:

[1001] (a) covalent linkage of amino acids, to the N-terminus, e.g. 1-5 amino acids to the N-terminus, optionally via an ester bond to PLA at position 6 (according to the numbering of wild type glucagon), optionally together with modifications at position 1 or 2, e.g. as described herein, that improve resistance to DPP-W cleavage;

[1002] (b) deletion of amino acids at positions 29 and/or 28, and optionally position 27 (according to the numbering of wild type glucagon);

[1003] (c) covalent linkage of amino acids to the C-terminus;

[1004] (d) non-conservative substitutions, conservative substitutions, additions or deletions while retaining desired activity, for example, conservative substitutions at one or more of positions 2, 5, 7, 10, 11, 12, 13, 14, 16, 17, 18, 19, 20, 21, 24, 27, 28 or 29, substitution of Tyr at position 10 with Val or Phe, substitution of Lys at position 12 with Arg, substitution of one or more of these positions with Ala;

[1005] (e) modification of the aspartic acid at position 15, for example, by substitution with glutamic acid, homoglutamic acid, cysteic acid or homocysteic acid, which may reduce degradation; or modification of the serine at position 16, for example, by substitution of threonine, AIB, glutamic acid or with another negatively charged amino acid having a side chain with a length of 4 atoms, or alternatively with any one of glutamine, homoglutamic acid, or homocysteic acid, which likewise may reduce degradation due to cleavage of the Asp15-Ser16 bond;

[1006] (f) modification of the methionine at position 27, for example, by substitution with leucine or norleucine, to reduce oxidative degradation;

[1007] (g) modification of the Gln at position 20 or 24, e.g. by substitution with Ala or AIB, to reduce degradation that occurs through deamidation of Gln

[1008] (h) modification of Asp at position 21, e.g. by substitution with Glu, to reduce degradation that occurs through dehydration of Asp to form a cyclic succinimide intermediate followed by isomerization to iso-aspartate;

[1009] (j) homodimerization or heterodimerization as described herein; and

[1010] (k) combinations of the above.

[1011] It is understood that any of the modifications within the same class may be combined together and/or modifications of different classes are combined. For example, the modifications of (1)(a) may be combined with (2)(a) and (3); (1)(a) may be combined with (2)(b), e.g. lactam bridge or salt bridge, and (3); (1)(a) may be combined with (2)(c) and (3); (1)(b) may be combined with (2)(a) and (3); (1)(b) may be combined with (2)(b), e.g. lactam bridge or salt bridge, and (3); (1)(b) may be combined with (2)(c) and (3); any of the foregoing may be combined with (4)(a) and/or (4)(b); and any of the foregoing may be combined with any of (5)(a) through (5)(k).

[1012] In exemplary embodiments, the α, α-disubstituted amino acid AIB is substituted at one, two, three or all of positions 16, 20, 21, or 24 (according to the amino acid numbering of wild type glucagon).

[1013] In exemplary embodiments, the intramolecular bridge is a salt bridge.

[1014] In other exemplary embodiments, the intramolecular bridge is a covalent bond, e.g. a lactam bridge. In some embodiments, the lactam bridge is between the amino acids at positions 9 and 12, the amino acids at positions 12 and 16, the amino acids at positions 16 and 20, the amino acids at positions 20 and 24, or the amino acids at positions 24 and 28 (according to the amino acid numbering of SEQ ID NO: 1401).

[1015] In exemplary embodiments, acylation or alkylation is at position 6, 10, 20 or 24 or the N-terminus or C-terminus (according to the amino acid numbering of wild type glucagon) SEQ ID NO: 1401).

[1016] In exemplary embodiments, modifications include:

[1017] (i) substitution of Asp at position 15 (according to the numbering of SEQ ID NO: 1401) with cysteic acid, glutamic acid, homoglutamic acid, and homocysteic acid;

[1018] (ii) substitution of Ser at position 16 (according to the numbering of SEQ ID NO: 1401) with cysteic acid, glutamic acid, homoglutamic acid, and homocysteic acid;

[1019] (iii) substitution of Asn at position 28 with a charged amino acid;

[1020] (iv) substitution of Asn at position 28 with a charged amino acid selected from the group consisting of Lys, Arg, His, Asp, Glu, cysteic acid, and homocysteic acid;

[1021] (v) substitution at position 28 with Asn, Asp, or Glu;

[1022] (vi) substitution at position 28 with Asp;

[1023] (vii) substitution at position 28 with Glu;

[1024] (viii) substitution of Thr at position 29 with a charged amino acid;

[1025] (ix) substitution of Thr at position 29 with a charged amino acid selected from the group consisting of Lys, Arg, His, Asp, Glu, cysteic acid, and homocysteic acid;

[1026] (x) substitution at position 29 with Asp, Glu, or Lys;

[1027] (xi) substitution at position 29 with Glu;

[1028] (xii) insertion of 1-3 charged amino acids after position 29;

[1029] (xiii) insertion after position 29 of Glu or Lys;

[1030] (xiv) insertion after position 29 of Gly-Lys or Lys-Lys;

[1031] or combinations thereof.

[1032] Any of the modifications described above which increase GLP-1 receptor agonist activity, glucagon receptor antagonist activity, peptide solubility, and/or peptide stability can be applied individually or in combination.

[1033] Modification to Enhance Stability

[1034] In accordance with some embodiments the Class 5 peptides disclosed herein can be further modified to include the amino acid sequence of SEQ ID NO: 1421 (GPSSGAPPPS), or SEQ ID NO: 1450, linked to the carboxy terminal amino acid (position 24) of the Class 5 peptide and administered to individuals to induce weight loss or assist in weight maintenance. More particularly, the Class 5 peptide comprises a sequence selected from the group consisting of SEQ ID NO: 1405, SEQ ID NO: 1406, SEQ ID NO: 1407, SEQ ID NO: 1408, SEQ ID NO: 1409, SEQ ID NO: 1412, SEQ ID NO: 1413, SEQ ID NO: 1414, SEQ ID NO: 1416, SEQ ID NO: 1417, SEQ ID NO: 1418, SEQ ID NO: 1419, SEQ ID NO: 1422, SEQ ID NO: 1423, SEQ ID NO: 1424 and SEQ ID NO: 1425 and further comprising the amino acid sequence of SEQ ID NO: 1421 (GPSSGAPPPS), or SEQ ID NO: 1450, linked to the carboxy terminal amino acid (position 24) of the peptide or Class 5 peptide, is used to suppress appetite and inducing weight loss/weight maintenance. In some embodiments the administered peptide or Class 5 peptide comprises a sequence selected from the group consisting of SEQ ID NO: 1416, SEQ ID NO: 1417, SEQ ID NO: 1418 and SEQ ID NO: 1419, further comprising the amino acid sequence of SEQ ID NO: 1421 (GPSSGAPPPS) linked to the carboxy terminal amino acid (position 24) of the Class 5 peptide. In some embodiments the method comprises administering a peptide or Class 5 peptide comprising the sequence of SEQ ID NO: 1445 or SEQ ID NO: 1446.

[1035] Accordingly, it is expected that the Class 5 peptides disclosed herein can be similarly modified to decrease their susceptibility to premature chemical cleavage in aqueous buffers. In accordance with some embodiments the Class 5 peptides described herein can be further modified to enhance their stability in aqueous solutions by replacing the native aspartic amino acid, located at corresponding position 15 of native glucagon, with an amino acid selected from the group consisting of cysteic acid, glutamic acid, homoglutamic acid and homocysteic acid. In accordance with some embodiments the aspartic acid residue at position 10 of class 5 peptide of SEQ ID NO: 1405, SEQ ID NO: 1406, SEQ ID NO: 1407 or SEQ ID NO: 1408 can be substituted with an amino acid selected from the group consisting of cysteic acid, glutamic acid, homoglutamic acid and homocysteic acid, and in some embodiments the native aspartic acid at position 10 of SEQ ID NO: 1405, SEQ ID NO: 1406, SEQ ID NO: 1407 or SEQ ID NO: 1408 is replaced with glutamic acid. In accordance with some embodiments a class 5 peptide having improved stability in aqueous solutions is provided wherein the antagonist comprises a modified sequence of SEQ ID NO: 1409, wherein the modification comprises substitution of the Asp at position 10 of SEQ ID NO: 1409 with Glu. In some embodiments a class 5 peptide is provided comprising a sequence selected form the group consisting of SEQ ID NO: 1422, SEQ ID NO: 1423, SEQ ID NO: 1424 and SEQ ID NO: 1425. In some embodiments the class 5 peptide is amidated.

[1036] The Asp-Ser sequence at position 15-16 of native glucagon has been identified as a uniquely unstable dipeptide that leads to premature chemical cleavage of the native hormone in aqueous buffers. For example, when maintained at 0.01N HCl at 37° C. for 2 weeks, more than 50% of the native glucagon may be cleaved into fragments. The two liberated cleavage peptides 1-15 and 16-29 are devoid of glucagon-like biological activity and thus represent a limitation on the aqueous pre-formulation of glucagon and its related analogs. The selective chemical substitution of the Asp at position 15 of native glucagon with Glu has been observed to virtually eliminate chemical cleavage of the 15-16 peptide bond.

[1037] In yet further exemplary embodiments, any of the foregoing compounds can be further modified to improve stability by modifying the amino acid corresponding to position 15 or 16 of native glucagon, to reduce degradation of the peptide over time, especially in acidic or alkaline buffers.

[1038] Modification to Enhance Solubility

[1039] The class 5 peptide can be further modified to improve the peptide's solubility in aqueous solutions at physiological pH, in certain aspects, while retaining the glucagon antagonist and GLP-1 agonist activity. Introduction of hydrophilic groups at positions corresponding to positions 12, 15, 16, 19 and 24 of the peptide of SEQ ID NO: 1405, or at positions 12, 16, 19 or 24 of the peptide of SEQ ID NO: 1406 can improve the solubility of the resulting peptides in solutions having a physiological pH, while retaining the parent compounds glucagon antagonist and GLP agonist activity. Therefore, in some embodiments the presently disclosed class 5 peptide that are further modified to comprise one or more hydrophilic groups covalently linked to the side chains of amino acids corresponding to amino acid positions 12, 15, 16, 19 and 24 of the peptide of SEQ ID NO: 1405 or SEQ ID NO: 1406. In a further embodiment the side chains of amino acids corresponding to amino acid positions 16 and 19 of SEQ ID NO: 1405 or SEQ ID NO: 1406 are covalently bound to hydrophilic groups, and in some embodiments the hydrophilic group is polyethylene glycol (PEG).

[1040] Class 5 glucagon related peptides can be modified by introducing charge at its carboxy terminus to enhance the solubility of the peptide while retaining the agonist properties of the peptide. The enhanced solubility allows for the preparation and storage of glucagon solutions at near neutral pH. Formulating glucagon solutions at relatively neutral pHs (e.g. pH of about 6.0 to about 8.0) improves the long term stability of the Class 5 peptides.

[1041] Applicants anticipate that class 5 peptides disclosed herein can be similarly modified to enhance their solubility in aqueous solutions at relatively neutral pH (e.g. pH of about 6.0 to about 8.0), in some cases, while retaining a glucagon antagonist and GLP-1 activity. Accordingly, some embodiments is directed to a glucagon antagonist/GLP-1 of SEQ ID NO: 1405, SEQ ID NO: 1406, SEQ ID NO: 1407 or SEQ ID NO: 1408 that has been further modified relative to the native amino acids present at positions 6-29 of the wild type glucagon (SEQ ID NO: 1401) to add charge to the peptide by the substitution of native non-charged amino acids with charged amino acids, or the addition of charged amino acids to the carboxy terminus. In accordance with some embodiments, one to three of the non-charged native amino acids of the class 5 peptides disclosed herein are replaced with a charged amino acid. In some embodiments the charged amino acid is selected from the group consisting of lysine, arginine, histidine, aspartic acid and glutamic acid. More particularly, applicants have discovered that substituting the normally occurring amino acid corresponding to position 28 and/or 29 (relative to native glucagon) with charged amino acids, and/or the addition of one to two charged amino acids at the carboxy terminus of the peptide, enhances the solubility and stability of the Class 5 peptide in aqueous solutions at physiologically relevant pHs (i.e., a pH of about 6.5 to about 7.5). Accordingly such modifications of class 5 peptides are anticipated to have a similar effect on the solubility in aqueous solutions, particularly at a pH ranging from about 5.5 to about 8.0, while retaining the parent peptide's biological activity

[1042] In accordance with some embodiments the class 5 peptide of SEQ ID NO: 1405, SEQ ID NO: 1406, SEQ ID NO: 1407 or SEQ ID NO: 1408 is modified by the substitution of the native amino acid at position 23 and/or 24 of those sequences with a negatively charged amino acid (e.g., aspartic acid or glutamic acid) and optionally the addition of a negatively charged amino acid (e.g., aspartic acid or glutamic acid) to the carboxy terminus of the peptide. In an alternative embodiment a class 5 peptide comprising SEQ ID NO: 1405, SEQ ID NO: 1406, SEQ ID NO: 1407 or SEQ ID NO: 1408 is modified by the substitution of the native amino acid at position 24 of SEQ ID NO: 1405, SEQ ID NO: 1406, SEQ ID NO: 1407 or SEQ ID NO: 1408 with a positively charged amino acid (e.g., lysine, arginine or histidine) and optionally the addition of one or two positively charged amino acid (e.g., lysine, arginine or histidine) on the carboxy terminus of the peptide. In accordance with some embodiments a class 5 peptide having improved solubility and stability is provided wherein the analog comprises the amino acid sequence of SEQ ID NO: 1415 or SEQ ID NO: 1451 with the proviso that at least one amino acids at position, 23, or 24 of SEQ ID NO: 1415 or SEQ ID NO: 1451 is substituted with an acidic amino acid and/or an additional acidic amino acid added at the carboxy terminus of SEQ ID NO: 1415 or SEQ ID NO: 1451. In some embodiments the acidic amino acids are independently selected from the group consisting of Asp, Glu, cysteic acid and homocysteic acid.

[1043] In accordance with some embodiments a class 5 peptide having improved solubility and stability is provided wherein the antagonist comprises the amino acid sequence of SEQ ID NO: 1416, SEQ ID NO: 1417, SEQ ID NO: 1418 or SEQ ID NO: 1419. In accordance with some embodiments a glucagon agonist is provided comprising the sequence of SEQ ID NO: 1416 or SEQ ID NO: 1417. In some embodiments the class 5 peptide comprises the sequence of SEQ ID NO: 1420.

[1044] In accordance with some embodiments a class 5 peptide is provided comprising the sequence of SEQ ID NO: 1415 or SEQ ID NO: 1451. In some embodiments, position 4 of SEQ ID NO: 1415 or SEQ ID NO: 1451 is aspartic acid, glutamic acid, homoglutamic acid, cysteic acid or homocysteic acid, and in some embodiments position 4 is aspartic acid, glutamic acid, cysteic acid or homocysteic acid, and in a further embodiment position 4 of SEQ ID NO: 1415 or SEQ ID NO: 1451 is aspartic acid or glutamic acid, and in some embodiments position 4 of SEQ ID NO: 1415 or SEQ ID NO: 1451 is aspartic acid. In some embodiments a class 5 peptide is provided comprising the sequence of SEQ ID NO: 1415 or SEQ ID NO: 1451 wherein position 4 of SEQ ID NO: 1415 is aspartic acid and position 10 of SEQ ID NO: 1415 is glutamic acid. In a further embodiment the C-terminal amino acid of SEQ ID NO: 1415 or SEQ ID NO: 1451 is modified to replace the native carboxylic acid group with a charge-neutral group, such as an amide or ester.

[1045] Class 5 Peptide Fusions

[1046] In a further embodiment, the carboxy terminal amino acid of the Class 5 peptide described herein is covalently bound to a second peptide comprising a sequence selected from the group consisting of SEQ ID NOs: 1421, 1426, 1427, and 1450. For example, in some embodiments, the Class 5 peptide of SEQ ID NO: 1415, SEQ ID NO: 1451, SEQ ID NO: 1405, SEQ ID NO: 1406, SEQ ID NO: 1407, SEQ ID NO: 1408, SEQ ID NO: 1412, SEQ ID NO: 1413, SEQ ID NO: 1414, SEQ ID NO: 1416, SEQ ID NO: 1417, SEQ ID NO: 1418, SEQ ID NO: 1419, SEQ ID NO: 1422, SEQ ID NO: 1423, SEQ ID NO: 1424 and SEQ ID NO: 1425 is covalently bound to a second peptide comprising a sequence selected from the group consisting of SEQ ID NO: 1421 (GPSSGAPPPS), SEQ ID NO: 1426 (KRNRNNIA), SEQ ID NO: 1427 (KRNR) and SEQ ID NO: 1450 (GPSSGAPPPSX).

[1047] In some embodiments a class 5 peptide dimer is provided comprising two sequences independently selected from the group consisting of

[1048] SEQ ID NO: 1405, SEQ ID NO: 1406, SEQ ID NO: 1407, SEQ ID NO: 1408, SEQ ID NO: 1409, SEQ ID NO: 1422, SEQ ID NO: 1423, SEQ ID NO: 1424 and SEQ ID NO: 1425 that further comprises an amino acid sequence of SEQ ID NO: 1421 (GPSSGAPPPS) linked to the carboxy terminal amino acid of the class 5 peptide.

[1049] In some embodiments, the class 5 peptide is further modified by truncation or deletion of one or two amino acids of the C-terminus of the peptide (i.e., truncation of the amino acid at position 29 or at positions 28 and 29 of native glucagon). Preferably truncation does not effect activity (e.g., glucagon antagonism/GLP-1 agonism) of a class 5 peptide.

[1050] Class 5 Peptide Conjugates

[1051] Conjugates of Class 5 peptides are also provided, in which the glucagon peptide is linked, optionally via covalent bonding and optionally via a linker, to a conjugate moiety.

[1052] In those embodiments wherein the class 5 peptide comprises a polyethylene glycol chain, the polyethylene glycol chain may be in the form of a straight chain or it may be branched. In accordance with some embodiments the polyethylene glycol chain has an average molecular weight selected from the range of about 500 to about 10,000 Daltons. In some embodiments the polyethylene glycol chain has an average molecular weight selected from the range of about 1,000 to about 5,000 Daltons. In some embodiments the polyethylene glycol chain has an average molecular weight selected from the range of about 1,000 to about 5,000 Daltons. In some embodiments the polyethylene glycol chain has an average molecular weight selected of about 1,000 to about 2,000 Daltons. In some embodiments the polyethylene glycol chain has an average molecular weight of about 1,000 Daltons.

[1053] In some embodiments the pegylated class 5 peptide comprises a peptide consisting of the sequence of SEQ ID NO: 1415 or SEQ ID NO: 1451 wherein the polyethylene glycol chain is linked to an amino acid selected from positions 11, 12, 15, 16, 19 and 24 of SEQ ID NO: 1415 or SEQ ID NO: 1451, and the molecular weight of the PEG chain is about 1,000 to about 5,000 Daltons. In some embodiments the pegylated class 5 peptide comprises a peptide consisting of the sequence of SEQ ID NO: 1415 or SEQ ID NO: 1451 wherein the polyethylene glycol chain is linked to the amino acid at position 16 or 19 of SEQ ID NO: 1415 or SEQ ID NO: 1451, and the molecular weight of the PEG chain is about 1,000 to about 5,000 Daltons. In a further embodiment the modified class 5 peptide comprises two or more polyethylene glycol chains covalently bound to the peptide wherein the total molecular weight of the glucagon chains is about 1,000 to about 5,000 Daltons. In some embodiments the class 5 peptide comprises the sequence of SEQ ID NO: 1415 or SEQ ID NO: 1451 wherein a polyethylene glycol chain is linked to the amino acid at positions 16 and 19 of SEQ ID NO: 1415 or SEQ ID NO: 1451 and the combined molecular weight of the two PEG chains is about 1,000 to about 5,000 Daltons.

[1054] The class 5 glucagon related peptide may comprise the amino acid sequence of any of SEQ ID NOs: 1401-1518, optionally with up to 1, 2, 3, 4, or 5 further modifications that retain glucagon antagonist and GLP-1 agonist activity.

### Class 6 Glucagon Related Peptides

[1055] Provided herein are peptides that are GIP agonist peptides contemplated for use in treating subjects in need thereof, e.g. with diabetes and obesity. Such peptides described below and termed “Class 6 glucagon related peptides” are similar to Class 2 glucagon related peptides, and all of the modifications, analogs, variants, derivatives, multimers, fusions and conjugates described within the Class 2 glucagon related peptides apply equally to Class 6 glucagon related peptides. Q may be any of these Class 6 glucagon peptides.

[1056] SEQ ID NOS: 2001-2565 correspond to SEQ ID NOs: 1-565 of U.S. Prov. App. 61/716,878 filed Oct. 22, 2012, incorporated by reference in its entirety. SEQ ID NOS: 3001-3262 correspond to SEQ ID NOs: 1-262 of Int'l Appl. No. PCT/US11/66164 incorporated herein by reference in its entirety. Thus, in some embodiments, Q is any of SEQ ID NOs: 2001-2565 and 3001-3262.

[1057] Native glucagon does not activate the GIP receptor, and normally has about 1% of the activity of native GLP-1 at the GLP-1 receptor. In some embodiments, the peptides are glucagon analogs comprising a structure based on the amino acid sequence of native human glucagon (SEQ ID NO: 1) but differing at one or more positions as compared to SEQ ID NO: 1, wherein the differences, or modifications, enhance the agonist activity of the analog at the GIP receptor. Such glucagon analogs will have agonist activity at the GIP receptor greater than that of native glucagon and, in some aspects, greater than that of native GIP. In some or any embodiments, the GIP agonist has a GIP percentage potency of at least 0.1%. In some or any aspects of the present disclosures, the glucagon analog additionally exhibits agonist activity at one or both of the glucagon receptor and the GLP-1 receptor. Accordingly, GIP agonists, GIP-GLP-1 co-agonists, GIP-glucagon co-agonists, and GIP-GLP-1-glucagon triagonists are provided herein.

[1058] In exemplary embodiments, the selectivity of the GIP agonist peptide of the present disclosures for the human GLP-1 receptor versus the GIP receptor is less than 100-fold. In some or any embodiments, the GIP agonist peptide has GIP percentage potency within 20-fold or 10-fold different (higher or lower) of the glucagon percentage potency and/or GLP-1 percentage potency.

[1059] In some embodiments of the present disclosures, the glucagon analogs comprise (i) an amino acid comprising an imidazole side chain at position 1, (ii) a DPP-IV protective amino acid at position 2, (iii) an amino acid comprising a non-native acyl or alkyl group, optionally at any of positions 9, 10, 12, 16, 20, or 37-43, and optionally wherein the non-native acyl or alkyl group is linked to such amino acid via a spacer; (iv) an alpha helix stabilizing amino acid at one or more of positions 16, 17, 18, 19, 20 or 21, and (v) up to ten (e.g., up to 1, 2, 3, 4, 5, 6, 7, 8 or 9) additional amino acid modifications relative to SEQ ID NO: 1.

[1060] In exemplary embodiments, the glucagon analog comprising (i) an amino acid comprising an imidazole side chain at position 1 (e.g., His), (ii) a DPP-IV protective amino acid at position 2, optionally, aminoisobutyric acid, (iii) an amino acid comprising a non-native acyl or alkyl group, optionally at any of positions 9, 10, 12, 16, 20, or 37-43, optionally wherein the non-native acyl or alkyl group is linked to such amino acid via a spacer; (iv) an alpha, alpha disubstituted amino acid or an amino acid comprising an imidazole side chain at position 20, and (v) up to ten (e.g., up to 1, 2, 3, 4, 5, 6, 7, 8 or 9) additional amino acid modifications relative to SEQ ID NO: 1.

[1061] In exemplary embodiments, the glucagon analog comprises (i) an amino acid comprising an imidazole side chain at position 1, (ii) a DPP-IV protective amino acid at position 2, optionally, aminoisobutyric acid, (iii) an amino acid comprising a non-native acyl or alkyl group, optionally at any of positions 9, 10, 12, 16, 20, or 37-43, optionally wherein the non-native acyl or alkyl group is linked to such amino acid via a spacer; (iv) an alpha helix stability amino acid at one or more of positions 16-21, optionally, position 16, wherein the analog does not comprise an alpha helix stabilizing amino acid at position 20, and (v) up to ten (e.g., up to 1, 2, 3, 4, 5, 6, 7, 8, or 9) additional amino acid modifications relative to SEQ ID NO: 1. In alternative exemplary embodiments, the glucagon analog comprises (i) an amino acid selected from the group consisting of: Ala, Leu, Ile, Val, norvaline, homoserine, Met, and methionine sulfone at position 3 of the analog; (ii) an amino acid comprising a non-native acyl or alkyl group, optionally at any of positions 9, 10, 12, 16, 20, or 37-43, optionally wherein the non-native acyl or alkyl group is linked to such amino acid via a spacer; (iii) an alpha helix stability amino acid at one or more of positions 16-21, and (iv) up to ten (e.g., up to 1, 2, 3, 4, 5, 6, 7, 8, or 9) additional amino acid modifications relative to SEQ ID NO: 1.

[1062] In exemplary embodiments, when the glucagon analog lacks a hydrophilic moiety, the glucagon analog exhibits a GIP percentage potency of at least 0.1% (e.g., at least 1%, at least 10%, at least 20%). In exemplary embodiments, the glucagon analog has less than 100-fold (e.g., less than 50-fold, less than 25-fold, less than 10-fold) selectivity for the human GLP-1 receptor versus the GIP receptor. In exemplary embodiments, the glucagon analog exhibits an EC50 at the GLP-1 receptor which is within 100-fold (e.g., within 50-fold, within 25-fold, within 10-fold) of its EC50 at the GIP receptor.

[1063] All references to a particular amino acid position by number (e.g., position 28) refer to the amino acid at that position in native glucagon (SEQ ID NO: 1) or the corresponding amino acid position in any analog thereof or related peptide. For example, a reference herein to “position 28” would mean the corresponding position 27 for a glucagon analog in which the first amino acid of SEQ ID NO: 1 has been deleted. Similarly, a reference herein to “position 28” would mean the corresponding position 29 for a glucagon analog in which one amino acid has been added before the N-terminus of SEQ ID NO: 1.

[1064] In some embodiments, the GIP agonist peptides comprise an amino acid sequence of any of SEQ ID NOs: 27-33, 35-41, 43-46, 76-80, 83-87, 89, and 90, or any of SEQ ID NOs: 48, 52, 53, and 74, or any of SEQ ID NOs: 50, 51, 54, 56, 58-60, 62-66, 68-70, 72, 73, 75, 81, 82, 88, and 92, all SEQ ID NOs with reference to Int'l Appl. No. PCT/US11/66164 incorporated herein by reference in its entirety. In some embodiments, the GIP agonist peptides comprise a structure based on a parent sequence comprising any of SEQ ID NOs: 27-33, 35-41, 43-46, 76-80, 83-87, 89, and 90, or any of SEQ ID NOs: 48, 52, 53, and 74, or any of SEQ ID NOs: 50, 51, 54, 56, 58-60, 62-66, 68-70, 72, 73, 75, 81, 82, 88, and 92, all SEQ ID NOs with reference to Int'l Appl. No. PCT/US11/66164 incorporated herein by reference in its entirety, but differs from the parent sequence at one or more positions, as further described herein.

[1065] The invention accordingly provides a peptide comprising, consisting essentially of, or consisting of the sequence of SEQ ID NO: 28 in Int'l Appl. No. PCT/US11/66164 incorporated herein by reference in its entirety. Also provided is a peptide comprising, consisting essentially of, or consisting of the sequence of SEQ ID NO: 37 in Int'l Appl. No. PCT/US11/66164 incorporated herein by reference in its entirety. The invention further provides a peptide comprising, consisting essentially of, or consisting of the sequence of SEQ ID NO: 89 in Intl Appl. No. PCT/US11/66164 incorporated herein by reference in its entirety. The invention furthermore provides a peptide comprising, consisting essentially of, or consisting of the sequence of SEQ ID NO: 180 in Int'l Appl. No. PCT/US11/66164 incorporated herein by reference in its entirety. The invention moreover provides a peptide comprising, consisting essentially of, or consisting of the sequence of SEQ ID NO: 31 in Int'l Appl. No. PCT/US11/66164 incorporated herein by reference in its entirety.

[1066] The invention provides a peptide comprising the sequence of SEQ ID NO: 184 in Int'l Appl. No. PCT/US11/66164 incorporated herein by reference in its entirety,

(SEQ ID NO: 184)

HX₂X₃GTFTSDX₁₀SKYLDX₁₆RX₁₈AX₂₀X₂₁FVQWLX₂₇X₂₈X₂₉GPS
SGX₃₅PPPS

[1067] wherein:
[1068] X₂ is AIB;
[1069] X₃ is Gln or Gln analog;
[1070] X₁₀ is Tyr or an amino acid covalently attached to a C12 to C18 acyl or alkyl group;
[1071] X₁₆ is any amino acid, optionally, any amino acid other than Gly, Pro, and Ser;
[1072] X₁₈ is Arg or Ala;
[1073] X₂₀ is negative charged amino acid or a charge-neutral amino acid, optionally, AIB or Gln;
[1074] X₂₁ is an acidic amino acid, optionally, Asp or Glu;
[1075] X₂₇ is Leu, Ala, Nle, or Met;
[1076] X₂₈ is Ala or an acidic amino acid (optionally, Asp or Glu);
[1077] X₂₉ is Ala or Gly;
[1078] X₃₅ is Ala or a basic amino acid (optionally, Arg or Lys);

[1079] wherein, when X₂₈ is an acidic amino acid, X₃₅ is a basic amino acid;

[1080] wherein, when X₁₀ is Tyr, the peptide comprises at position 40 an amino acid covalently attached to a C12 to C18 acyl or alkyl group, and, wherein, optionally, the peptide comprises Gly at position 41, and

[1081] wherein the C-terminal amino acid of the peptide is amidated.

[1082] The invention also provides a peptide comprising the sequence of SEQ ID NO: 184 with up to 3 amino acid modifications relative to SEQ ID NO: 184, wherein the analog exhibits agonist activity at each of the human GIP receptor, the human GLP-1 receptor and the human glucagon receptor.

[1083] The invention additionally provides a peptide comprising the sequence of SEQ ID NO: 185 in Int'l Appl. No. PCT/US11/66164 incorporated herein by reference in its entirety,

(SEQ ID NO: 185)

HX₂QGTFTSDX₁₀SKYLDX₁₆RX₁₈AX₂₀X₂₁FVQWLX₂₇X₂₈X₂₉GPSS
GAPPPS

[1084] wherein:
[1085] X₂ is AIB;
[1086] X₁₀ is Tyr or an amino acid covalently attached to a C12 to C18 acyl or alkyl group;
[1087] X₁₆ is Glu, an alpha, alpha disubstituted amino acid, Lys or
[1088] X₁₈ is Arg or Ala;
[1089] X₂₀ is AIB or Gln;
[1090] X₂₁ is Asp or Glu;
[1091] X₂₇ is Leu, Nle, or Met;
[1092] X₂₈ is Ala, Asp or Glu;
[1093] X₂₉ is Gly of Thr;
[1094] and

[1095] wherein, when X₁₀ is Tyr, the peptide comprises at position 40 an amino acid covalently attached to a C12 to C18 acyl or alkyl group, and, wherein, optionally, the peptide comprises Gly at position 41, and

[1096] wherein the C-terminal amino acid of the peptide is amidated.

[1097] The invention further provides a peptide comprising the sequence of SEQ ID NO: 185 with up to 3 amino acid modifications relative to SEQ ID NO: 185, wherein the analog exhibits agonist activity at each of the human GIP receptor, the human GLP-1 receptor and the human glucagon receptor.

[1098] Furthermore provided is a peptide comprising the sequence of SEQ ID NO: 186 in Int'l Appl. No. PCT/US11/66164 incorporated herein by reference in its entirety:

(SEQ ID NO: 186)

HX₂X₃GTFTSDX₁₀SKYLDX₁₆RX₁₈AX₂₀X₂₁FVQWLX₂₇X₂₈X₂₉

[1099] wherein:
[1100] X₂ is AIB;
[1101] X₃ is Gln or Gln analog;
[1102] X₁₀ is Tyr or an amino acid covalently attached to a C10 to C26 acyl or alkyl group;
[1103] X₁₆ is any amino acid, optionally, any amino acid other than Gly, Pro, and Ser;
[1104] X₁₈ is Arg or Ala;
[1105] X₂₀ is a negative charged amino acid or a charge-neutral amino acid, optionally, AIB or Gln;
[1106] X₂₁ is X₂₁ is an acidic amino acid, optionally, Asp or Glu;
[1107] X₂₇ is Leu, Ala, Nle, or Met;
[1108] X₂₈ is Ala or an acidic amino acid (optionally, Asp or Glu);
[1109] X₂₉ is Ala, Gly or Thr; and

[1110] wherein the peptide comprises an amino acid covalently attached to a C10 to C26 acyl or alkyl group, optionally, at position 10, and the C-terminal amino acid of the peptide is amidated.

[1111] Moreover provided is a peptide comprising the sequence of SEQ ID NO: 186 with up to 3 amino acid modifications relative to SEQ ID NO: 186, wherein the analog exhibits agonist activity at each of the human GIP receptor, the human GLP-1 receptor and the human glucagon receptor.

[1112] The invention provides a peptide comprising the sequence of SEQ ID NO: 187 in Int'l Appl. No. PCT/US11/66164 incorporated herein by reference in its entirety:

(SEQ ID NO: 187)

HX₂QGTFTSDX₁₀SKYLDX₁₆RX₁₈AX₂₀X₂₁FVQWLX₂₇X₂₈X₂₉

[1113] wherein:
[1114] X₂ is AIB;
[1115] X₁₀ is Tyr or an amino acid covalently attached to a C10 to C26 acyl or alkyl group;
[1116] X₁₆ is Glu, alpha, alpha-disubstituted amino acid, or Lys;
[1117] X₁₈ is Arg or Ala;
[1118] X₂₀ is a negative charged amino acid or a charge-neutral amino acid, optionally, AIB or Gln;
[1119] X₂₁ is Asp or Glu;
[1120] X₂₇ is Leu, Ala, Nle, or Met;
[1121] X₂₈ is Ala, Asp or Glu;
[1122] X₂₉ is Gly or Thr; and

[1123] wherein the peptide comprises an amino acid covalently attached to a C12 to C18 acyl or alkyl group, optionally, at position 10, and the C-terminal amino acid of the peptide is amidated.

[1124] The invention also provides SEQ ID NO: 187 with up to 3 amino acid modifications relative to SEQ ID NO: 187, wherein the analog exhibits agonist activity at each of the human GIP receptor, the human GLP-1 receptor and the human glucagon receptor.

[1125] The invention further provides an analog of any one of SEQ ID NOs: 184, 185, 186, and 187, as described in Int'l Appl. No. PCT/US11/66164 incorporated herein by reference in its entirety, but X₃ or the amino acid at position 3 is Gln or Gln analog or an amino acid which reduces glucagon activity, including, those described herein. In exemplary embodiments, the amino acid which reduces glucagon activity is an acidic, basic, or hydrophobic amino acid (e.g., Glu, Orn, or Nle). Optionally, the amino acid at position 3 is Glu.

[1126] Furthermore provided herein is an analog of glucagon (SEQ ID NO: 1) having GIP agonist activity, comprising:
[1127] (a) an amino acid comprising an imidazole side chain at position 1,
[1128] (b) at position 16, an amino acid of Formula IV:

[chemical structure]

[1129] wherein n is 1 to 7, wherein each of R1 and R2 is independently selected from the group consisting of H, C1-C18 alkyl, (C1-C18 alkyl)OH, (C1-C18 alkyl)NH2, (C1-C18 alkyl)SH, (C0-C4 alkyl)(C3-C6)cycloalkyl, (C0-C4 alkyl)(C2-C5 heterocyclic), (C0-C4 alkyl)(C6-C10 aryl)R7, and (C1-C4 alkyl)(C3-C9 heteroaryl), wherein R7 is H or OH, wherein optionally the side chain of the amino acid of Formula IV comprises a free amino group,
[1130] (c) an α,α-disubstituted amino acid at position 20,
[1131] (d) up to ten additional amino acid modifications relative to SEQ ID NO: 1,
   wherein, when the analog lacks a hydrophilic moiety, the glucagon analog exhibits at least 0.1% activity of native GIP at the GIP receptor, wherein the glucagon analog has less than 100-fold selectivity for the human GLP-1 receptor versus the GIP receptor.

[1132] The invention also provides a peptide comprising
[1133] (a) the sequence of:

HX₂X₃GTFTSDX₁₀SKYLX₁₅X₁₆X₁₇X₁₈X₁₉X₂₀X₂₁FVQWLX₂₇X₂₈
X₂₉X₃₀PSSGX₃₅PPPS

(SEQ ID NO: 66 in U.S. Prov. App. 61/716878 filed Oct. 22, 2012, incorporated by reference herein in its entirety)
wherein:
[1134] X₂ is AIB;
[1135] X₃ is Gln or an amino acid comprising a side chain structure of Structure I, II, or III, as described herein;
[1136] X₁₀ is Tyr or an amino acid covalently attached to a C12 to C18 acyl or alkyl group;
[1137] X₁₅ is an acidic amino acid, optionally, Glu or Asp;
[1138] X₁₆ is any amino acid, optionally, any amino acid other than Gly, Pro, and Ser; e.g., Glu, Ala, alpha, alpha-disubstituted amino acid (e.g., AIB), His, Lys,
[1139] X₁₇ is Arg, His, Gln;
[1140] X₁₈ is Arg or Ala;
[1141] X₁₉ is Ala or alpha, alpha disubstituted amino acid;
[1142] X₂₀ is a selected from group consisting of: alpha, alpha-disubstituted amino acid (e.g., AIB) or Gln or His, Lys, or Ala;
[1143] X₂₁ is an acidic amino acid, optionally, Asp or Glu;
[1144] X₂₇ is Leu, Ala, Nle, or Met;
[1145] X₂₈ is Ala or an acidic amino acid (optionally, Asp or Glu);
[1146] X₂₉ is aliphatic, e.g., Ala or Gly or AIB or Val;
[1147] X₃₀ is small aliphatic amino acid, e.g., Ala or Gly
[1148] X₃₅ is Ala or a basic amino acid (optionally, Arg or Lys);

[1149] wherein, when X₂₈ is an acidic amino acid, X₃₅ is a basic amino acid;

[1150] optionally, wherein, when X₂₈ is Asp, then X₂₉ is not Gly

[1151] wherein, when X₁₀ is Tyr, the peptide comprises at position 40 an amino acid covalently attached to a C12 to C18 acyl or alkyl group, and, wherein, optionally, the peptide comprises Gly at position 41,

[1152] wherein the C-terminal amino acid of the peptide is amidated;

or
[1153] (b) the sequence SEQ ID NO: 66 with up to 3 amino acid modifications relative to SEQ ID NO: 66, wherein the peptide exhibits agonist activity at the human GIP receptor and, the human GLP-1 receptor and/or the human glucagon receptor.

[1154] The present disclosures also provides a peptide comprising
[1155] (a) the sequence of

X₁X₂X₃GTFTSDX₁₀SKYLX₁₅X₁₆X₁₇X₁₈X₁₉X₂₀X₂₁FVQWLX₂₇
X₂₈X₂₉X₃₀PSSGX₃₅PPPS

(SEQ ID NO: 67 in U.S. Prov. App. 61/716,878 filed Oct. 22, 2012, incorporated by reference herein in its entirety)
wherein:
[1156] X₁ is an amino acid comprising a side chain imidazole, optionally, a His or His derivative;
[1157] X₂ is a DPP-IV protective amino acid, optionally, an alpha, alpha-disubstituted amino acid (e.g., AIB);
[1158] X₃ is selected from the group consisting of Glu, Ala, Leu, Ile, Nle, Val, NorVal, homoserine, Met, methionine sulfoxide, methionine sulfone, acetyl-Orn, acetyl-diaminobutanoic acid, acetyl-Lys;
[1159] X₁₀ is an amino acid covalently attached to a C12 to C18 acyl or alkyl group;
[1160] X₁₅ is an acidic amino acid, optionally, Glu or Asp;
[1161] X₁₆ is any amino acid, optionally, any amino acid other than Gly, Pro, and Ser; (e.g., Glu, Ala, alpha, alpha-disubstituted amino acid (e.g., AIB), His, Lys)
[1162] X₁₇ is Arg, His, Gln;
[1163] X₁₈ is Arg or Ala;
[1164] X₁₉ is Ala or alpha, alpha disubstituted amino acid;
[1165] X₂₀ is a selected from group consisting of: alpha, alpha-disubstituted amino acid (e.g., AIB) or Gln or His, Lys, or Ala;
[1166] X₂₁ is an acidic amino acid, optionally, Asp or Glu;
[1167] X₂₇ is Leu, Ala, Nle, or Met;
[1168] X₂₈ is Ala or an acidic amino acid (optionally, Asp or Glu);
[1169] X₂₉ is aliphatic, e.g., Ala or Gly or AIB or Val;
[1170] X₃₀ is small aliphatic amino acid, e.g., Ala or Gly
[1171] X₃₅ is Ala or a basic amino acid (optionally, Arg or Lys);
   wherein, when X₂₈ is an acidic amino acid, X₃₅ is a basic amino acid; optionally, wherein, when X₂₈ is Asp, then X₂₉ is not Gly
   wherein, when X₁₀ is Tyr, the peptide comprises at position 40 an amino acid covalently attached to a C12 to C18 acyl or alkyl group, and, wherein, optionally, the peptide comprises Gly at position 41,
   wherein the C-terminal amino acid of the peptide is amidated;
   or
[1172] (b) the sequence SEQ ID NO: 67 with up to 3 amino acid modifications relative to SEQ ID NO: 67, wherein the peptide exhibits agonist activity at the human GIP receptor and, the human GLP-1 receptor and/or the human glucagon receptor.

[1173] In exemplary embodiments, the GIP agonist peptides comprise an amino acid sequence of any of SEQ ID NOs: 19, 21-26, 28, 287, 289-294, 296, 520, 522-527, and 529, or any of SEQ ID NOs: 30, 31, 32, 33, 35, 37, 38, and 41, all SEQ ID NOs with reference to U.S. Prov. App. 61/716,878 filed Oct. 22, 2012, incorporated by reference herein in its entirety. In some embodiments, the GIP agonist peptides comprise a structure based on a parent sequence comprising any of SEQ ID NOs: 30, 31, 32, 33, 35, 37, 38, 41, 298, 299, 300, 301, 303, 305, 306, 309, 531, 532, 533, 534, 536, 538, 539, and 542, all SEQ ID NOs with reference to U.S. Prov. App. 61/716,878 filed Oct. 22, 2012, incorporated by reference herein in its entirety, but differs from the parent sequence at one or more positions, as further described herein.

[1174] The invention accordingly provides a peptide comprising, consisting essentially of, or consisting of the sequence of SEQ ID NO: 18 in U.S. Prov. App. 61/716,878 filed Oct. 22, 2012, incorporated by reference herein in its entirety. Also provided is a peptide comprising, consisting essentially of, or consisting of the sequence of SEQ ID NO: 43 in U.S. Prov. App. 61/716,878 filed Oct. 22, 2012, incorporated by reference herein in its entirety.

[1175] The invention also provides a peptide comprising, consisting essentially of, or consisting of any one of SEQ ID NOs: 100-282; SEQ ID NOs: 333-515 in U.S. Prov. App. 61/716,878 filed Oct. 22, 2012, incorporated by reference herein in its entirety.

[1176] The invention also provides a peptide comprising, consisting essentially of, or consisting of any one of SEQ ID NOs: 15-28, 34, 36, 39, 42, 43, 44, 52, 53, 63-65, 283-296, 302, 304, 307, 310, 311, 312, 320, 321, 330-332, 516-529, 535, 537, 540, 543, 544, 545, 553, 554, and 563-565 in U.S. Prov. App. 61/716,878 filed Oct. 22, 2012, incorporated by reference herein in its entirety.

[1177] The invention also provides a peptide comprising, consisting essentially of, or consisting of any one of SEQ ID NOs: 29-42, 297-310, and 530-543 in U.S. Prov. App. 61/716,878 filed Oct. 22, 2012, incorporated by reference herein in its entirety.

### Exemplary Embodiments

[1178] In exemplary embodiments, the class 6 peptide of the present disclosures is an analog of glucagon (SEQ ID NO: 1) comprising (i) an amino acid comprising an imidazole side chain at position 1, (ii) a DPP-IV protective amino acid at position 2, (iii) an acylated amino acid or alkylated amino acid, optionally at any of positions 9, 10, 12, 16, 20, or 37-43, wherein optionally the acyl or alkyl group is linked to the amino acid via a spacer; (iv) an alpha helix stabilizing amino acid at one or more of positions 16-21, and (v) up to ten additional amino acid modifications relative to SEQ ID NO: 1, wherein when the glucagon analog is not conjugated to a heterologous moiety, e.g., a hydrophilic moiety (e.g., PEG), the glucagon analog exhibits at least or about 0.1% (e.g., at least or about 1%, at least or about 10%, at least or about 50%, at least about 80%, at least or about 100%, at least or about 500%) activity of native GIP at the GIP receptor.

[1179] The class 6 glucagon analogs described here may comprise any activity profile described herein. In exemplary aspects, the class 6 glucagon analog exhibits a GIP percentage potency of at least or about 1%, at least or about 10%, at least or about 50%, at least or about 90%, at least or about 100%, at least or about 300%, or at least or about 500%. In some aspects, the class 6 glucagon analog also exhibits a GLP-1 percentage potency of at least or about 1%, at least or about 10%, at least or about 50%, at least or about 90%, at least or about 100%, at least or about 300%, or at least or about 500%. In alternative or additional aspects, the class 6 glucagon analog exhibits a glucagon percentage potency of at least or about 1%, at least or about 10%, at least or about 50%, at least or about 90%, or at least or about 100%. Accordingly, while the class 6 glucagon analogs may be considered as GIP agonist peptides, in some aspects, the class 6 glucagon analogs additionally may be considered as a GIP-GLP-1 co-agonist, a GIP-glucagon co-agonist, or a GIP-GLP-1-glucgaon triagonist. For example, the peptide may exhibit agonist activity at each of the human GIP receptor, the human GLP-1 receptor and the human glucagon receptor, wherein the peptide exhibits an EC50 at the GIP receptor which is within 100-fold (e.g., 50-fold, 40-fold, 30-fold, 20-fold, 15-fold, 10-fold, or less) of its EC50 at the GLP-1 receptor and is within 100-fold (e.g., 50-fold, 40-fold, 30-fold, 20-fold, 15-fold, 10-fold, or less) of its EC50 at the glucagon receptor.

[1180] In exemplary embodiments, the class 6 glucagon analog comprises an amino acid comprising an imidazole side chain at position 1. In exemplary aspects, the amino acid at position 1 comprises a structure of Formula A

[chemical structure]

wherein each of R1 and R2 independently is selected from the group consisting of H, (C1-6)alkyl, O(C1-6)alkyl, (C1-6)alkyl-OH, F, and (C1-C6)alkyl of which at least one H is replaced by F.

[1181] In exemplary aspects, the amino acid at position 1 is the native residue of glucagon (SEQ ID NO: 1) L-histidine (His), or is a derivative of His (His derivative), e.g., a derivative of His in which the alpha atoms are modified. As used herein, the term “His derivative” refers to a chemical moiety comprising an imidazole, e.g., comprising a structure of Formula A, or a substituted imidazole, attached to at least one carbon atom. In exemplary embodiments, the His derivative comprises a structure similar to the structure of histidine, except that the alpha amine, alpha carbon, or alpha carboxylate is replaced with another chemical moiety. In exemplary embodiments, the His derivative is an alpha substituted histidine of which the hydrogen atom linked to the alpha carbon is substituted with another chemical moiety, e.g., methyl, ethyl, propyl, isopropyl, hydroxyl, methoxy, ethoxy, and the like. The His derivative in some aspects is D-histidine, desaminohistidine, hydroxyl-histidine, acetyl-histidine, homo-histidine, N-methyl histidine, alpha-methyl histidine, imidazole acetic acid, or alpha, alpha-dimethyl imidiazole acetic acid (DMIA).

[1182] In some aspects, the DPP-IV protective amino acid at position 2 is one of D-serine, D-alanine, valine, glycine, N-methyl serine, N-methyl alanine, or alpha, aminoisobutyric acid (AIB). In some aspects, the DPP-IV protective amino acid is D-Ser, or a conservative amino acid substitution thereof, or an α,α-disubstituted amino acid. In some aspects, the α,α-disubstituted amino acid comprises R1 and R2, each of which is bonded to the alpha carbon, wherein each of R1 and R2 is independently selected from the group consisting of C1-C4 alkyl, optionally substituted with a hydroxyl, amide, thiol, halo, or R1 and R2 together with the alpha carbon to which they are attached form a ring. In some aspects, the α,α-disubstituted amino acid is AIB. In exemplary aspects, when the DPP-IV protective amino acid is D-Ser, the GIP agonist peptide is not conjugated to a heterologous moiety, e.g., a hydrophilic moiety (e.g., PEG). In other aspects of the present disclosures, the DPP-IV protective amino acid is not D-serine.

[1183] In some aspects, the class 6 glucagon analog comprises an alpha helix stabilizing amino acid at any of positions 16, 17, 18, 19, 20, or 21. In some aspects, the glucagon analog comprises an alpha helix stabilizing amino acid at one, two, three, four, five, or all of positions 16, 17, 18, 19, 20, or 21. In exemplary aspects, the class 6 glucagon analog comprises an alpha helix stabilizing amino acid at positions 16, 17, 20, and 21. In some aspects, the class 6 glucagon analog comprises an alpha helix stabilizing amino acid at positions 16 and 20. In alternative or additional aspects, the class 6 glucagon analog comprises an alpha helix stabilizing amino acid at positions 17 and 21.

[1184] In some aspects, when the class 6 glucagon analog comprises an alpha helix stabilizing amino acid at position 20, the amino acid at position 20 is an alpha, alpha disubstituted amino acid. In exemplary aspects, the α,α-disubstituted amino acid comprises R1 and R2, each of which is bonded to the alpha carbon, wherein each of R1 and R2 is independently selected from the group consisting of C1-C4 alkyl, optionally substituted with a hydroxyl, amide, thiol, halo, or R1 and R2 together with the alpha carbon to which they are attached form a ring. In some embodiments, the α,α-disubstituted amino acid is 1-aminocyclopropane-1-carboxylate (ACPC). In some aspects, the α,α-disubstituted at position 20 is AIB. Optionally, in some embodiments, when the amino acid at position 20 is an alpha, alpha disubstituted amino acid, the amino acid at position 16 is an alpha helix stabilizing amino acid other than AIB. In exemplary embodiments, the amino acid at position 16 is a charged amino acid, e.g., a positive-charged amino acid, negative charged amino acid. In some aspects, when the amino acid at position 20 is an alpha, alpha disubstituted amino acid, the amino acid at position 16 is a positive-charged amino acid of Formula IV, e.g., Lys, or is a negative-charged amino acid, e.g., Glu. In some aspects, when the amino acid at position 20 is an alpha, alpha disubstituted amino acid, the amino acid at position 16 is a charge neutral amino acid, e.g., Ser, Ala, Gly.

[1185] Accordingly, in exemplary embodiments, the class 6 glucagon analog comprises (i) an amino acid comprising an imidazole side chain at position 1, (ii) a DPP-IV protective amino acid at position 2, optionally, aminoisobutyric acid, (iii) an amino acid comprising a non-native acyl or alkyl group, optionally at any of positions 9, 10, 12, 16, 20, or 37-43, optionally wherein the non-native acyl or alkyl group is linked to such amino acid via a spacer; (iv) an alpha, alpha disubstituted amino acid at position 20, and (v) up to ten (e.g., up to 1, 2, 3, 4, 5, 6, 7, 8 or 9) additional amino acid modifications relative to SEQ ID NO: 1.

[1186] In exemplary embodiments, when the class 6 glucagon analog comprises an alpha, alpha disubstituted amino acid at position 20, and when the class 6 glucagon analog lacks a hydrophilic moiety, the glucagon analog exhibits a GIP percentage potency of at least 0.1% (e.g., at least 1%, at least 10%, at least 20%). In exemplary embodiments, the class 6 glucagon analog has less than 100-fold (e.g., less than or about 90-fold, less than or about 80-fold, less than or about 70-fold, less than or about 60-fold, less than or about 50-fold, less than or about 40-fold, less than or about 30-fold, less than or about 20-fold, less than or about 15-fold, less than or about 10-fold, less than or about 5-fold) selectivity for the human GLP-1 receptor versus the GIP receptor. In exemplary aspects, the peptide has an EC50 at the GIP receptor which is less than 100-fold (e.g., less than or about 90-fold, less than or about 80-fold, less than or about 70-fold, less than or about 60-fold, less than or about 50-fold, less than or about 40-fold, less than or about 30-fold, less than or about 20-fold, less than or about 15-fold, less than or about 10-fold, less than or about 5-fold) different than its EC50 at the GLP-1 receptor, which, optionally, is less than 100-fold (e.g., less than or about 90-fold, less than or about 80-fold, less than or about 70-fold, less than or about 60-fold, less than or about 50-fold, less than or about 40-fold, less than or about 30-fold, less than or about 20-fold, less than or about 15-fold, less than or about 10-fold, less than or about 5-fold), different from its EC50 at the glucagon receptor.

[1187] In exemplary embodiments, when the class 6 glucagon analog comprises an alpha, alpha disubstituted amino acid at position 20, the α,α-disubstituted amino acid comprises R1 and R2, each of which is bonded to the alpha carbon, wherein each of R1 and R2 is independently selected from the group consisting of C1-C4 alkyl, optionally substituted with a hydroxyl, amide, thiol, halo, or R1 and R2 together with the alpha carbon to which they are attached form a ring. In exemplary embodiments, the α,α-disubstituted amino acid at position 20 is AIB. Also, in exemplary embodiments, when the glucagon analog comprises an alpha, alpha disubstituted amino acid at position 20, the amino acid at position 16 is an alpha helix stabilizing amino acid other than AIB. In exemplary aspects, the amino acid at position 16 is a charged amino acid, optionally, a negative charged amino acid (e.g., Glu or Asp) or a positive charged amino acid (e.g., Lys or Orn).

[1188] In alternative embodiments, the class 6 glucagon analog does not comprise an alpha helix stabilizing amino acid at position 20, and one or more of positions 16, 17, 18, 19, or 21 is an alpha helix stabilizing amino acid. In some aspects, the alpha helix stabilizing amino acid is located at position 16. In some embodiments, the alpha helix stabilizing amino acid is a negative charged amino acid (e.g., Glu), a positive-charged amino acid, (e.g., comprising a structure of Formula IV (e.g., Lys)), or an alpha, alpha disubstituted amino acid. In some aspects, the α,α-disubstituted amino acid comprises R1 and R2, each of which is bonded to the alpha carbon, wherein each of R1 and R2 is independently selected from the group consisting of C1-C4 alkyl, optionally substituted with a hydroxyl, amide, thiol, halo, or R1 and R2 together with the alpha carbon to which they are attached form a ring. In specific aspects, the α,α-disubstituted amino acid at position 16 is AIB.

[1189] In additional embodiments, when the class 6 glucagon analog does not comprise an alpha helix stabilizing amino acid at position 20, and when one or more of positions 16, 17, 18, 19, or 21 is an alpha helix stabilizing amino acid, the glucagon analog comprises (i) an extension of 1 to 21 amino acids C-terminal to the amino acid at position 29 of the peptide analog or (ii) the acylated amino acid or alkylated amino acid is located at position 10, 12, or 16. In some aspects, the glucagon analog comprises an extension of 1 to 21 amino acids C-terminal to the amino acid at position 29 of the peptide analog, and optionally the amino acid at position 29 is Gly. The extension of 1 to 21 amino acids in some aspects is any of those described herein. In some aspects, the extension comprises an amino acid sequence which forms a Trp cage structure, e.g., the extension comprises the amino acid sequence of GPSSGAPPPS (SEQ ID NO: 5), or a conservatively substituted sequence thereof. In alternative aspects, the extension of 1 to 21 amino acids comprises at least one charged amino acid. In exemplary aspects, the extension comprises an amino acid sequence of: X1-X2, wherein X1 is a charged amino acid and X2 is a small aliphatic amino acid. In some aspects, X1 is a positive charged amino acid, e.g., Arg. In some aspects, extension comprises Arg-Gly.

[1190] Accordingly, in alternative exemplary embodiments, the class 6 glucagon analog comprises (i) an amino acid comprising an imidazole side chain at position 1, (ii) a DPP-IV protective amino acid at position 2, optionally, aminoisobutyric acid, (iii) an amino acid comprising a non-native acyl or alkyl group, optionally at any of positions 9, 10, 12, 16, 20, or 37-43, optionally wherein the non-native acyl or alkyl group is linked to such amino acid via a spacer; (iv) an alpha helix stability amino acid at one or more of positions 16-21, optionally, position 16, wherein the analog does not comprise an alpha helix stabilizing amino acid at position 20, and (v) up to ten (e.g., up to 1, 2, 3, 4, 5, 6, 7, 8 or 9) additional amino acid modifications relative to SEQ ID NO: 1. In exemplary aspects, the analog does not comprise at position 20 an alpha, alpha di-substituted amino acid, optionally, AIB, or an alpha helix stabilizing amino acid selected from the group consisting of: Leu, Phe, Ala, Met, Gly, Ile, Ser, Asn, Glu, Asp, Lys, and Arg. In exemplary aspects, the glucagon analog is not modified at position 20 compared to SEQ ID NO: 1, and, therefore has Gln residue which is the native amino acid of glucagon at this position.

[1191] In exemplary embodiments, when the class 6 glucagon analog comprises an alpha helix stability amino acid at one or more of positions 16-21, optionally, position 16, and the analog does not comprise an alpha helix stabilizing amino acid at position 20, and when the glucagon analog lacks a hydrophilic moiety, the glucagon analog exhibits a GIP percentage potency of at least 0.1% (e.g., at least 1%, at least 10%, at least 20%). In exemplary embodiments, the glucagon analog has less than 100-fold (e.g., less than or about 90-fold, less than or about 80-fold, less than or about 70-fold, less than or about 60-fold, less than or about 50-fold, less than or about 40-fold, less than or about 30-fold, less than or about 20-fold, less than or about 15-fold, less than or about 10-fold, less than or about 5-fold) selectivity for the human GLP-1 receptor versus the GIP receptor. In exemplary aspects, the peptide has an EC50 at the GIP receptor which is less than 100-fold (e.g., less than or about 90-fold, less than or about 80-fold, less than or about 70-fold, less than or about 60-fold, less than or about 50-fold, less than or about 40-fold, less than or about 30-fold, less than or about 20-fold, less than or about 15-fold, less than or about 10-fold, less than or about 5-fold) different than its EC50 at the GLP-1 receptor, which, optionally, is less than 100-fold (e.g., less than or about 90-fold, less than or about 80-fold, less than or about 70-fold, less than or about 60-fold, less than or about 50-fold, less than or about 40-fold, less than or about 30-fold, less than or about 20-fold, less than or about 15-fold, less than or about 10-fold, less than or about 5-fold), different from its EC50 at the glucagon receptor.

[1192] In exemplary aspects, when the class 6 glucagon analog comprises an alpha helix stability amino acid at one or more of positions 16-21 and the analog does not comprise an alpha helix stabilizing amino acid at position 20, the glucagon analog comprises an alpha helix stabilizing amino acid at position 16, optionally, wherein the alpha helix stabilizing amino acid is a negative charged amino acid (e.g., Glu or Asp) or an alpha, alpha disubstituted amino acid. The α,α-disubstituted amino acid at position 16 may comprise R1 and R2, each of which is bonded to the alpha carbon, wherein each of R1 and R2 is independently selected from the group consisting of C1-C4 alkyl, optionally substituted with a hydroxyl, amide, thiol, halo, or R1 and R2 together with the alpha carbon to which they are attached form a ring. In exemplary aspects, the amino acid at position 16 is AIB. In exemplary aspects, the class 6 glucagon analog comprises at position 18 a small aliphatic amino acid, optionally, Ala, and an Arg at position 17. In exemplary aspects, the glucagon analog comprises the sequence ERAAQ (SEQ ID NO: 200 of Int'l Appl. No. PCT/US11/66164 incorporated herein by reference in its entirety) as positions 16 through 20 or ERAAQD (SEQ ID NO: 201 of Intl Appl. No. PCT/US11/66164 incorporated herein by reference in its entirety) as positions 16 through 21.

[1193] In exemplary aspects, the class 6 glucagon analog comprises an amino acid comprising a non-native acyl or alkyl group at any one of positions 9, 10, 12, 16, 20. In exemplary aspects, the glucagon analog comprises an amino acid covalently attached to a C12 to C18 acyl group or alkyl group at any one or more of positions 9, 10, 12, 13, 14, 16, 17, and 20. In exemplary aspects, the class 6 glucagon analog comprises an amino acid covalently attached to a 12 to C18 acyl group or alkyl group at any one or more of positions 10, 14 In some aspects, the glucagon analog comprises an acylated amino acid or alkylated amino acid at position 10, 12, or 16. In exemplary aspects, the acylated amino acid or alkylated amino acid is at position 14. In some aspects, the glucagon analog comprises an extension of 1 to 21 amino acids C-terminal to the amino acid at position 29 and comprises an amino acid comprising a non-native acyl or alkyl group at any of positions 37-43 (e.g., 37, 38, 39, 40, 41, 42, 43). In some aspects, the amino acid comprising a non-native acyl or alkyl group is at position 40.

[1194] In exemplary aspects, the class 6 glucagon analog comprises an extension of 1 to 21 amino acids C-terminal to the amino acid at position 29 and, in some aspects, the extension forms a structure known in the art as a Trp cage. In some aspects, the extension comprises the amino acid sequence GPSSGAPPPS (SEQ ID NO: 5) or GGPSSGAPPPS (SEQ ID NO: 6) or GPSSGRPPPS (SEQ ID NO: 183), all SEQ ID NOs of Int'l Appl. No. PCT/US11/66164 incorporated herein by reference in its entirety, or a sequence of one of the foregoing with 1, 2, or 3 conservative amino acid substitutions. In alternative aspects, the extension comprises at least one charged amino acid, e.g., the extension comprises an amino acid sequence of: X1-X2, wherein X1 is a charged amino acid (e.g., a positive charged amino acid (e.g., Arg)) and X2 is a small aliphatic amino acid. In some aspects, the extension comprises Arg-Gly.

[1195] In exemplary aspects, the acylated amino acid or alkylated amino acid comprises a structure of Formula I (optionally, Lys), Formula II, (optionally, Cys), or Formula III, (optionally, Ser). Optionally, in some aspects, the acylated amino acid or alkylated amino acid comprises a structure of Formula I, e.g., Lys.

[1196] In some embodiments, the acylated or alkylated amino acid is an aromatic amino acid comprising a side chain amine. In exemplary aspects, the aromatic amino acid comprising a side chain amine is 4-amino-phenylalanine (4-aminoPhe), p-amino phenylglycine, p-amino homophenylalanine, or 3-amino tyrosine. In exemplary aspects, the aromatic amino acid comprising a side chain amine is 4-amino-Phe. In exemplary aspects, the acylated or alkylated amino acid is an amino acid of Formula II, n is 2 (homoserine). In exemplary aspects, the acylated or alkylated amino acid is Thr or homothreonine. In exemplary embodiments, the acylated or alkylated amino acid is an aromatic amino acid comprising a side chain hydroxyl, including but not limited to tyrosine, homotyrosine, methyl-tyrosine, or 3-amino tyrosine.

[1197] In exemplary aspects, the class 6 glucagon analog comprises an amino acid covalently attached to a Cx-succinoyl, wherein x is an integer between 10 and 26, optionally, between 12 and 18. In exemplary aspects, the Cx-succinoyl is attached to the peptide or class 6 glucagon analog via a spacer. The spacer may be any one of those described herein.

[1198] In some aspects, the acylated amino acid or alkylated amino acid is linked to the acyl group or alkyl group via a spacer. In some aspects, the spacer is 3 to 10 atoms in length. In some aspects, the spacer is an amino acid or dipeptide, and, in some aspects, the spacer comprises one or two acidic amino acid residues, e.g., Glu. In some aspects, the acyl or alkyl group is linked to the amino acid via wherein the total length of the spacer and the acyl group is about 14 to about 28 atoms in length. In some aspects, the spacer comprises a Cys. In some aspects, the spacer comprises one or two gamma-Glu. In some aspects, the spacer comprises a Lys. In some aspects, the spacer comprises a combination of two of Cys, gamma-Glu, and Lys, or two gamma-Glu residues.

[1199] In particular aspects, the spacer is a Cys residue, which is covalently attached to an alkyl group, e.g., a non-functionalized or functionalized carbon chain. In exemplary aspects, the Cys residue is S-palmityl alkylated (i.e., S-palmitate alkylated), optionally, wherein the Cys residue is attached to a Lys residue which is part of the peptide backbone. In alternative embodiments, the spacer is a dipeptide comprising a Cys residue, which is covalently attached to an alkyl group. In exemplary aspects, the Cys is S-palmityl alkylated, and the Cys is attached to another amino acid of the spacer, which, in turn, is attached to, e.g., a Lys residue which is part of the peptide backbone.

[1200] In exemplary aspects, the spacer comprises a small polyethylene glycol moiety (PEG) comprising a structure [—O—CH₂—CH₂-]₁, wherein n is an integer between 2 and 16, (e.g., 2, 3, 4, 5, 6, 7, 8, 9, 10, 11, 12, 13, 14, 15, 16).

[1201] With regard to the acylated amino acid, the acyl group in some aspects is a C12 to C18 (e.g., C12, C13, C14, C15, C16, C17, C18) fatty acyl group. In some aspects, the acyl group is a C14 or C16 fatty acyl group. In alternative aspects, the acyl group is a succinic acid or a succinic acid derivative (e.g., a succinic acid derivative of Formula V, VI, or VII). In alternative aspects, the acyl group is a maleic acid or a maleic acid derivative (e.g., a maleic acid derivative of Formula VIII, IX, or X).

[1202] With regard to the alkylated amino acid, the non-native alkyl group in some aspects is a carboxy-functionalized carbon chain of structure -Cx-COOH, wherein x is an integer, optionally an integer between 4-30 (e.g., 4, 5, 6, 7, 8, 9, 10, 11, 12, 13, 14, 15, 16, 17, 18, 19, 20, 21, 22, 23, 24, 25, 26, 27, 28, 29, 30).

[1203] In exemplary aspect, the class 6 peptide or class 6 glucagon analog comprises two or more acyl or alkyl groups. In this regard, the peptide or glucagon analog may be a diacylated or dual acylated peptide. The two or more acyl or alkyl groups may be arranged in a linear formation, optionally with intervening spacers. The two or more acyl or alkyl groups may be arranged in a branched formation, as described herein. In exemplary aspects, the two acyl or alkyl groups are attached to a Lys spacer residue.

[1204] In some aspects of the present disclosures, the class 6 glucagon analog comprises at least one charged amino acid C-terminal to the amino acid at position 27. For example, in some aspects, the class 6 glucagon analog comprises a charged amino acid (e.g., a negative charged amino acid) at position 28. The negative charged amino acid in some aspects is Asp. In alternative aspects, the amino acid at position 28 is a positive charged amino acid, e.g., a positive charged amino acid is an amino acid of Formula I, e.g., Lys.

[1205] In alternative or additional aspects, the class 6 glucagon analog comprises an amino acid modification at position 27, at position 29, or at both positions 27 and 29. For example, the amino acid at position 27 is in some aspects is Leu, Nle, Val, or Lys and/or the amino acid at position 29 is in some aspects Gly or Thr.

[1206] The class 6 glucagon analogs described herein may comprise additional amino acid modifications, e.g., up to ten (e.g., 0, 1, 2, 3, 4, 5, 6, 7, 8, 9, 10) additional amino acid modifications, relative to SEQ ID NO: 1, as further discussed herein. In exemplary aspects, the class 6 glucagon analog comprises one or more of:
[1207] a) a DPP-IV protective amino acid at position 1 of the peptide analog;
[1208] b) an acidic amino acid, optionally, Glu, at position 3;
[1209] c) an Ile at position 7;
[1210] d) an Ile or Arg at position 12;
[1211] e) an acidic amino acid, optionally, Glu, at position 15;
[1212] f) an aliphatic amino acid, optionally, Ala, at position 18;
[1213] g) an acidic amino acid, optionally, Glu, at position 21;
[1214] h) an Asn, Ala, or AIB at position 24;
[1215] i) an aliphatic amino acid, optionally, Ala, or Leu, or Nle, at position 27;
[1216] j) an acidic amino acid, optionally, Glu, or an aliphatic amino acid, optionally, Ala, at position 28;
[1217] k) an aliphatic amino acid, optionally, Ala, at position 29;
[1218] l) amidation at the C-terminus.

[1219] In accordance with the foregoing, the class 6 glucagon analog in exemplary aspects comprises the amino acid sequence of any of SEQ ID NOs: 27-33, 35-41, 43-46, 76-80, 83-87, 89, and 90 or any of SEQ ID NOs: 94-100, 102-112, 120-124, 127-131 of Int'l Appl. No. PCT/US11/66164 incorporated herein by reference in its entirety. In exemplary aspects, the glucagon analog comprises or consists of any of SEQ ID NOs: 94-100, 102-112, 120-124, 127-131 of Int'l Appl. No. PCT/US11/66164 incorporated herein by reference in its entirety. In exemplary aspects, the glucagon analog comprises or consists of any of SEQ ID NOs: 28, 29, 31, 37-41, 43-46, 76-80, 83-87, 89, and 90 of Int'l Appl. No. PCT/US11/66164 incorporated herein by reference in its entirety. In exemplary aspects, the glucagon analog comprises of consists of any of SEQ ID NOs: 28, 29, 31, 37-41, 79, 80, 89, 90, 95, 130, 145-152, 155-167, 171, 176, 177, 180, 203-207, 212, and 230 of Int'l Appl. No. PCT/US11/66164 incorporated herein by reference in its entirety. In exemplary aspects, the glucagon analog comprises or consists of SEQ ID NO: 27 of Int'l Appl. No. PCT/US11/66164 incorporated herein by reference in its entirety. In exemplary aspects, the glucagon analog comprises or consists of SEQ ID NO: 30 of Int'l Appl. No. PCT/US11/66164 incorporated herein by reference in its entirety. In exemplary aspects, the glucagon analog comprises or consists of SEQ ID NO: 32 of Int'l Appl. No. PCT/US11/66164 incorporated herein by reference in its entirety. In exemplary aspects, the glucagon analog comprises or consists of SEQ ID NO: 33 of Int'l Appl. No. PCT/US11/66164 incorporated herein by reference in its entirety. In exemplary aspects, the glucagon analog comprises or consists of SEQ ID NO: 35 of Int'l Appl. No. PCT/US11/66164 incorporated herein by reference in its entirety. In exemplary aspects, the glucagon analog comprises or consists of SEQ ID NO: 36 of Int'l Appl. No. PCT/US11/66164 incorporated herein by reference in its entirety. In exemplary aspects, the glucagon analog comprises or consists of SEQ ID NO: 28 of Int'l Appl. No. PCT/US11/66164 incorporated herein by reference in its entirety. In exemplary aspects, the glucagon analog comprises or consists of SEQ ID NO: 37 of Int'l Appl. No. PCT/US11/66164 incorporated herein by reference in its entirety. In exemplary aspects, the glucagon analog comprises or consists of SEQ ID NO: 89 of Int'l Appl. No. PCT/US11/66164 incorporated herein by reference in its entirety. In exemplary aspects, the glucagon analog comprises or consists of SEQ ID NO: 31 of Int'l Appl. No. PCT/US11/66164 incorporated herein by reference in its entirety. In exemplary aspects, the glucagon analog comprises or consists of SEQ ID NO: 180 of Int'l Appl. No. PCT/US11/66164 incorporated herein by reference in its entirety.

[1220] The invention further provides a peptide comprising the sequence of SEQ ID NO: 28 of Int'l Appl. No. PCT/US11/66164 incorporated herein by reference in its entirety. In exemplary aspects, the peptide consists of SEQ ID NO: 28.

[1221] A peptide comprising the sequence of SEQ ID NO: 31 of Int'l Appl. No. PCT/US11/66164 incorporated herein by reference in its entirety is also provided by the invention. In exemplary aspects, the peptide consists of SEQ ID NO: 31.

[1222] The invention furthermore provides a peptide comprising the sequence of SEQ ID NO: 37 of Int'l Appl. No. PCT/US11/66164 incorporated herein by reference in its entirety. In exemplary aspects, the peptide consists of SEQ ID NO: 37.

[1223] The invention moreover provides peptide comprising the sequence of SEQ ID NO: 89 of Int'l Appl. No. PCT/US11/66164 incorporated herein by reference in its entirety. In exemplary aspects, the peptide consists of SEQ ID NO: 89.

[1224] The invention moreover provides peptide comprising the sequence of SEQ ID NO: 95 of Int'l Appl. No. PCT/US11/66164 incorporated herein by reference in its entirety. In exemplary aspects, the peptide consists of SEQ ID NO: 95.

[1225] The invention moreover provides peptide comprising the sequence of SEQ ID NO: 130 of Int'l Appl. No. PCT/US11/66164 incorporated herein by reference in its entirety. In exemplary aspects, the peptide consists of SEQ ID NO: 130.

[1226] Additionally, a peptide comprising the sequence of SEQ ID NO: 31 of Int'l Appl. No. PCT/US11/66164 incorporated herein by reference in its entirety is provided herein. In exemplary aspects, the peptide consists of SEQ ID NO: 171.

[1227] A peptide comprising the sequence of SEQ ID NO: 180 of Int'l Appl. No. PCT/US11/66164 incorporated herein by reference in its entirety is also provided by the invention. In exemplary aspects, the peptide consists of SEQ ID NO: 180.

[1228] The invention provides a peptide comprising the sequence of SEQ ID NO: 184 of Int'l Appl. No. PCT/US11/66164 incorporated herein by reference in its entirety,

(SEQ ID NO: 184)

HX₂X₃GTFTSDX₁₀SKYLDX₁₆RX₁₈AX₂₀X₂₁FVQWLX₂₇X₂₈X₂₉GPS
SGX₃₅PPPS

[1229] wherein:
[1230] X₂ is AIB;
[1231] X₃ is Gln or Gln analog;
[1232] X₁₀ is Tyr or an amino acid covalently attached to a C12 to C18 acyl or alkyl group;
[1233] X₁₆ is any amino acid, optionally, any amino acid other than Gly, Pro, and Ser;
[1234] X₁₈ is Arg or Ala;
[1235] X₂₀ is negative charged amino acid or a charge-neutral amino acid, optionally, AIB or Gln;
[1236] X₂₁ is an acidic amino acid, optionally, Asp or Glu;
[1237] X₂₇ is Leu, Ala, Nle, or Met;
[1238] X₂₈ is Ala or an acidic amino acid (optionally, Asp or Glu);
[1239] X₂₉ is Ala or Gly;
[1240] X₃₅ is Ala or a basic amino acid (optionally, Arg or Lys);

[1241] wherein, when X₂₈ is an acidic amino acid, X₃₅ is a basic amino acid;

[1242] wherein, when X₁₀ is Tyr, the peptide comprises at position 40 an amino acid covalently attached to a C12 to C18 acyl or alkyl group, and, wherein, optionally, the peptide comprises Gly at position 41, and

[1243] wherein the C-terminal amino acid of the peptide is amidated.

[1244] In exemplary aspects, X10 of SEQ ID NO: 184 is Tyr, the peptide comprises at position 40 an amino acid covalently attached to a C12 to C18 acyl or alkyl group, and the peptide optionally comprises Gly at position 41. In exemplary aspects, X10 of SEQ ID NO: 184 is an amino acid covalently attached to a C12-C18 acyl or alkyl group.

[1245] In exemplary aspects, X20 of SEQ ID NO: 184 is Gln, and optionally, the amino acid at position 16 is a negative charged amino acid (e.g., Glu). In exemplary aspects, X18 of SEQ ID NO: 184 is Ala and the peptide comprises E16, R17, A18, A19, and Q20.

[1246] In alternative exemplary aspects, X20 of SEQ ID NO: 184 is AIB. Optionally, X16 of SEQ ID NO: 184 is any amino acid other than AIB.

[1247] Also, in exemplary aspects, (i) X28 of SEQ ID NO: 184 is an acidic amino acid, optionally Asp or Glu, and X35 of SEQ ID NO: 184 is a basic amino acid, optionally Arg or Lys, (ii) only one of X27, X28 and X29 of SEQ ID NO: 184 is an Ala, (iii) the peptide comprise an amidated Gly at the C-terminus.

[1248] The invention also provides a peptide comprising the sequence of SEQ ID NO: 184 with up to 3 amino acid modifications (e.g., conservative substitutions) relative to SEQ ID NO: 184, wherein the analog exhibits agonist activity at each of the human GIP receptor, the human GLP-1 receptor and the human glucagon receptor. In exemplary embodiments, the activity (e.g., the EC50) at each of the human GIP receptor, the human GLP-1 receptor and the human glucagon receptor of the glucagon analog is within 100-fold (e.g., within 50-fold, within 25-fold, within 10-fold) of one another.

[1249] The invention additionally provides a peptide comprising the sequence of SEQ ID NO: 185 of Int'l Appl. No. PCT/US11/66164 incorporated herein by reference in its entirety,

(SEQ ID NO: 185)

HX₂QGTFTSDX₁₀SKYLDX₁₆RX₁₈AX₂₀X₂₁FVQWLX₂₇X₂₈X₂₉GPSS
GAPPPS

[1250] wherein:
[1251] X₂ is AIB;
[1252] X₁₀ is Tyr or an amino acid covalently attached to a C12 to C18 acyl or alkyl group;
[1253] X₁₆ is Glu, an alpha, alpha disubstituted amino acid, Lys or
[1254] X₁₈ is Arg or Ala;
[1255] X₂₀ is AIB or Gln;
[1256] X₂₁ is Asp or Glu;
[1257] X₂₇ is Leu, Nle, or Met;
[1258] X₂₈ is Ala, Asp or Glu;
[1259] X₂₉ is Gly of Thr;
[1260] and

[1261] wherein, when X₁₀ is Tyr, the peptide comprises at position 40 an amino acid covalently attached to a C12 to C18 acyl or alkyl group, and, wherein, optionally, the peptide comprises Gly at position 41, and

[1262] wherein the C-terminal amino acid of the peptide is amidated.

[1263] The invention also provides a peptide comprising the sequence of SEQ ID NO: 185 with up to 3 amino acid modifications (e.g., conservative substitutions) relative to SEQ ID NO: 185, wherein the analog exhibits agonist activity at each of the human GIP receptor, the human GLP-1 receptor and the human glucagon receptor. In exemplary embodiments, the activity (e.g., the EC50) at each of the human GIP receptor, the human GLP-1 receptor and the human glucagon receptor of the glucagon analog is within 100-fold (e.g., within 50-fold, within 25-fold, within 10-fold) of one another.

[1264] The invention also provides a peptide comprising the sequence of SEQ ID NO: 196 of Int'l Appl. No. PCT/US11/66164 incorporated herein by reference in its entirety,

(SEQ ID NO: 196)

HX₂X₃GTFTSDX₁₀SKYLDX₁₆RX₁₈AX₂₀X₂₁FVQWLX₂₇X₂₈X₂₉GPS
SGX₃₅PPPS

[1265] wherein:
[1266] X₂ is AIB;
[1267] X₃ is Gln or Gln analog or an amino acid that reduces glucagon activity (optionally Glu);
[1268] X₁₀ is Tyr or an amino acid covalently attached to a C12 to C18 acyl or alkyl group;
[1269] X₁₆ is any amino acid, optionally, any amino acid other than Gly, Pro, and Ser;
[1270] X₁₈ is Arg or Ala;
[1271] X₂₀ is negative charged amino acid or a charge-neutral amino acid, optionally, AIB or Gln;
[1272] X₂₁ is an acidic amino acid, optionally, Asp or Glu;
[1273] X₂₇ is Leu, Ala, Nle, or Met;
[1274] X₂₈ is Ala or an acidic amino acid (optionally, Asp or Glu);
[1275] X₂₉ is Ala or Gly;
[1276] X₃₅ is Ala or a basic amino acid (optionally, Arg or Lys);

[1277] wherein, when X₂₈ is an acidic amino acid, X₃₅ is a basic amino acid;

[1278] wherein, when X₁₀ is Tyr, the peptide comprises at position 40 an amino acid covalently attached to a C12 to C18 acyl or alkyl group, and, wherein, optionally, the peptide comprises Gly at position 41, and

wherein the C-terminal amino acid of the peptide is amidated.

[1279] Additional amino acids that reduce glucagon activity are described herein. In exemplary aspects, X3 is an acidic, basic, or hydrophobic amino acid (e.g., glutamic acid, ornithine, norleucine). In exemplary aspects, X3 is Glu.

[1280] Furthermore provided is a peptide comprising the sequence of SEQ ID NO: 186 of Int'l Appl. No. PCT/US11/66164 incorporated herein by reference in its entirety:

(SEQ ID NO: 186)

HX₂X₃GTFTSDX₁₀SKYLDX₁₆RX₁₈AX₂₀X₂₁FVQWLX₂₇X₂₈X₂₉

[1281] wherein:
[1282] X₂ is AIB;
[1283] X₃ is Gln or Gln analog;
[1284] X₁₀ is Tyr or an amino acid covalently attached to a C10 to C26 acyl or alkyl group;
[1285] X₁₆ is any amino acid, optionally, any amino acid other than Gly, Pro, and Ser;
[1286] X₁₈ is Arg or Ala;
[1287] X₂₀ is a negative charged amino acid or a charge-neutral amino acid, optionally, AIB or Gln;
[1288] X₂₁ is X₂₁ is an acidic amino acid, optionally, Asp or Glu;
[1289] X₂₇ is Leu, Ala, Nle, or Met;
[1290] X₂₈ is Ala or an acidic amino acid (optionally, Asp or Glu);
[1291] X₂₉ is Ala, Gly or Thr; and

[1292] wherein the peptide comprises an amino acid covalently attached to a C10 to C26 acyl or alkyl group, optionally, at position 10, and the C-terminal amino acid of the peptide is amidated.

[1293] In exemplary aspects, X20 of SEQ ID NO: 186 is AIB. In exemplary aspects, X29 is Thr and the peptide does not comprise GPSSGAPPPS (SEQ ID NO: 5). In some aspects, X20 of SEQ ID NO: 186 is AIB and X16 is an amino acid other than AIB.

[1294] In exemplary aspects, X20 is Gln. In some aspects, X16 is a negative charged amino acid, optionally, Glu. In exemplary aspects, X18 is Ala, and optionally, the peptide comprises E16, R17, A18, A19, and Q20.

[1295] In some aspects, the peptide of SEQ ID NO: 186 comprises an extension of 1 to 21 amino acids C-terminal to the amino acid at position 29, and optionally the amino acid at position 29 is Gly. In exemplary aspects, the extension comprises the amino acid sequence GPSSGAPPPS (SEQ ID NO: 5), or a conservatively substituted sequence thereof, or wherein the extension comprises the sequence X1-X2, wherein X1 is a charged amino acid and X2 is a small aliphatic amino acid, optionally, wherein X1 is a positive charged amino acid. In some aspects, the positive charged amino acid is Arg and optionally the peptide comprises or consists of Arg-Gly. In certain aspects, the extension comprises the amino acid sequence GPSSGAPPPS (SEQ ID NO: 5) followed by Lys or Lys-Gly, wherein the Lys is covalently attached to an C10 to C26 acyl group.

[1296] In exemplary aspects, the peptide comprises SEQ ID NO: 186, wherein X2 is AIB, X3 is Gln, X10 is an amino acid covalently attached to a C10 to C26 acyl or alkyl group, X18 is Arg or Ala, X20 is AIB or Gln, X21 is Asp or Glu, X29 is Gly, and the C-terminal amino acid is amidated, wherein Gly at position 29 is fused to GPSSGAPPPS followed by Lys or Lys-Gly, wherein the Lys is covalently attached to a C10-C26 acyl group.

[1297] The invention also provides a peptide comprising the sequence of SEQ ID NO: 186 with up to 3 amino acid modifications (e.g., conservative substitutions) relative to SEQ ID NO: 186, wherein the analog exhibits agonist activity at each of the human GIP receptor, the human GLP-1 receptor and the human glucagon receptor. In exemplary embodiments, the activity (e.g., the EC50) at each of the human GIP receptor, the human GLP-1 receptor and the human glucagon receptor of the glucagon analog is within 100-fold (e.g., within 50-fold, within 25-fold, within 10-fold) of one another.

[1298] The invention provides a peptide comprising the sequence of SEQ ID NO: 187 of Int'l Appl. No. PCT/US11/66164 incorporated herein by reference in its entirety:

(SEQ ID NO: 187)

HX₂QGTFTSDX₁₀SKYLDX₁₆RX₁₈AX₂₀X₂₁FVQWLX₂₇X₂₈X₂₉

[1299] wherein:
[1300] X₂ is AIB;
[1301] X₁₀ is Tyr or an amino acid covalently attached to a C10 to C26 acyl or alkyl group;
[1302] X₁₆ is Glu, alpha, alpha-disubstituted amino acid, or Lys;
[1303] X₁₈ is Arg or Ala;

[1304] X₂₀ is a negative charged amino acid or a charge-neutral amino acid, optionally, AIB or Gln;
[1305] X₂₁ is Asp or Glu;
[1306] X₂₇ is Leu, Ala, Nle, or Met;
[1307] X₂₈ is Ala, Asp or Glu;
[1308] X₂₉ is Gly or Thr; and

[1309] wherein the peptide comprises an amino acid covalently attached to a C12 to C18 acyl or alkyl group, optionally, at position 10, and the C-terminal amino acid of the peptide is amidated.

[1310] The invention also provides a peptide comprising the sequence of SEQ ID NO: 187 with up to 3 amino acid modifications (e.g., conservative substitutions) relative to SEQ ID NO: 187, wherein the analog exhibits agonist activity at each of the human GIP receptor, the human GLP-1 receptor and the human glucagon receptor. In exemplary embodiments, the activity (e.g., the EC50) at each of the human GIP receptor, the human GLP-1 receptor and the human glucagon receptor of the glucagon analog is within 100-fold (e.g., within 50-fold, within 25-fold, within 10-fold) of one another.

[1311] The invention provides a peptide comprising the sequence of SEQ ID NO: 198 of Int'l Appl. No. PCT/US11/66164 incorporated herein by reference in its entirety:

(SEQ ID NO: 198)

HX₂X₃GTFTSDX₁₀SKYLDX₁₆RX₁₈AX₂₀X₂₁FVQWLX₂₇X₂₈X₂₉

[1312] wherein:
[1313] X₂ is AIB;
[1314] X₃ is Gln or Gln analog or an amino acid that reduces glucagon activity (e.g., Glu);
[1315] X₁₀ is Tyr or an amino acid covalently attached to a C10 to C26 acyl or alkyl group;
[1316] X₁₆ is any amino acid, optionally, any amino acid other than Gly, Pro, and Ser;
[1317] X₁₈ is Arg or Ala;
[1318] X₂₀ is a negative charged amino acid or a charge-neutral amino acid, optionally, AIB or Gln;
[1319] X₂₁ is X₂₁ is an acidic amino acid, optionally, Asp or Glu;
[1320] X₂₇ is Leu, Ala, Nle, or Met;
[1321] X₂₈ is Ala or an acidic amino acid (optionally, Asp or Glu);
[1322] X₂₉ is Ala, Gly or Thr; and
   wherein the peptide comprises an amino acid covalently attached to a C10 to C26 acyl or alkyl group, optionally, at position 10, and the C-terminal amino acid of the peptide is amidated.

[1323] Additional amino acids that reduce glucagon activity are described herein. In exemplary aspects, X3 is an acidic, basic, or hydrophobic amino acid (e.g., glutamic acid, ornithine, norleucine). In exemplary aspects, X3 is Glu.

[1324] The invention provides a peptide comprising SEQ ID NO: 184 of Int'l Appl. No. PCT/US11/66164 incorporated herein by reference in its entirety. The invention provides a peptide comprising SEQ ID NO: 185 of Int'l Appl. No. PCT/US11/66164 incorporated herein by reference in its entirety. The invention provides a peptide comprising SEQ ID NO: 196 of Intl Appl. No. PCT/US11/66164 incorporated herein by reference in its entirety. The invention provides a peptide comprising SEQ ID NO: 186 of Intl Appl. No. PCT/US11/66164 incorporated herein by reference in its entirety. The invention provides a peptide comprising SEQ ID NO: 187 of Intl Appl. No. PCT/US11/66164 incorporated herein by reference in its entirety. The invention provides a peptide comprising SEQ ID NO: 198 of Intl Appl. No. PCT/US11/66164 incorporated herein by reference in its entirety.

[1325] Furthermore provided herein is an analog of glucagon (SEQ ID NO: 1) having GIP agonist activity, comprising:
[1326] (a) an amino acid comprising an imidazole side chain at position 1,
[1327] (b) at position 16, an amino acid of Formula IV:

[chemical structure]

[1328] wherein n is 1 to 7, wherein each of R1 and R2 is independently selected from the group consisting of H, C1-C18 alkyl, (C1-C18 alkyl)OH, (C1-C18 alkyl)NH2, (C1-C18 alkyl)SH, (C0-C4 alkyl)(C3-C6)cycloalkyl, (C0-C4 alkyl)(C2-C5 heterocyclic), (C0-C4 alkyl)(C6-C10 aryl)R7, and (C1-C4 alkyl)(C3-C9 heteroaryl), wherein R7 is H or OH, wherein optionally the side chain of the amino acid of Formula IV comprises a free amino group,
[1329] (c) an α,α-disubstituted amino acid at position 20,
[1330] (d) up to ten additional amino acid modifications relative to SEQ ID NO: 1,
   wherein, when the analog lacks a hydrophilic moiety, the glucagon analog exhibits at least 0.1% activity of native GIP at the GIP receptor, wherein the glucagon analog has less than 100-fold selectivity for the human GLP-1 receptor versus the GIP receptor.

[1331] In exemplary embodiments, the analog of glucagon (SEQ ID NO: 1) having GIP agonist activity, comprises one or more of:
[1332] (a) an amino acid comprising an imidazole side chain at position 1,
[1333] (b) at position 16, an amino acid of Formula IV:

[chemical structure]

[1334] wherein n is 1 to 7, wherein each of R1 and R2 is independently selected from the group consisting of H, C₁-C₁₈ alkyl, (C₁-C₁₈ alkyl)OH, (C₁-C₁₈ alkyl)NH₂, (C₁-C₁₈ alkyl)SH, (C₀-C₄ alkyl)(C₃-C₆)cycloalkyl, (C₀-C₄ alkyl)(C₂-C₅ heterocyclic), (C₀-C₄ alkyl)(C₆-C₁₀ aryl)R₇, and (C₁-C₄ alkyl)(C₃-C₉ heteroaryl), wherein R₇ is H or OH, optionally, wherein the side chain of the amino acid of Formula IV comprises a free amino group,
[1335] (c) an α,α-disubstituted amino acid at position 20,
[1336] (d) up to ten additional amino acid modifications relative to SEQ ID NO: 1,
   wherein, when the analog lacks a heterologous moiety, e.g., a hydrophilic moiety (e.g., PEG), the glucagon analog exhibits at least or about 0.1% (e.g., at least or about 1%, at least or about 10%, at least or about 50%, at least or about 80%, at least or about 100%, at least or about 500%) activity of native GIP at the GIP receptor. In exemplary aspects, the peptide has an EC50 at the GIP receptor which is less than 100-fold (e.g., less than or about 90-fold, less than or about 80-fold, less than or about 70-fold, less than or about 60-fold, less than or about 50-fold, less than or about 40-fold, less than or about 30-fold, less than or about 20-fold, less than or about 15-fold, less than or about 10-fold, less than or about 5-fold), different than its EC50 at the GLP-1 receptor, which, optionally, is less than 100-fold (e.g., less than or about 90-fold, less than or about 80-fold, less than or about 70-fold, less than or about 60-fold, less than or about 50-fold, less than or about 40-fold, less than or about 30-fold, less than or about 20-fold, less than or about 15-fold, less than or about 10-fold, less than or about 5-fold), different from its EC50 at the glucagon receptor.

[1337] In exemplary embodiments, the glucagon analog comprises at position 1 an amino acid comprising a structure of Formula A

[chemical structure]

wherein each of R1 and R2 independently is selected from the group consisting of H, (C1-6)alkyl, O(C1-6)alkyl, (C1-6)alkyl-OH, F, and (C1-C6)alkyl of which at least one H is replaced by F.

[1338] In exemplary aspects, the amino acid at position 1 is the native residue of glucagon (SEQ ID NO: 1) L-histidine (His), or is a derivative of His (His derivative), e.g., D-histidine, desaminohistidine, hydroxyl-histidine, acetyl-histidine, homo-histidine, N-methyl histidine, alpha-methyl histidine, imidazole acetic acid, or alpha, alpha-dimethyl imidiazole acetic acid (DMIA).

[1339] In exemplary aspects, the glucagon analog comprises the amino acid of Formula IV at position 16 in (b) is homoLys, Lys, Orn, or 2,4-diaminobutyric acid (Dab).

[1340] In exemplary aspects, the amino acid at position 20, e.g., the α,α-disubstituted amino acid, comprises R1 and R2, each of which is bonded to the alpha carbon, wherein each of R1 and R2 is independently selected from the group consisting of C1-C4 alkyl, optionally substituted with a hydroxyl, amide, thiol, halo, or R1 and R2 together with the alpha carbon to which they are attached form a ring. In exemplary aspects, the α,α-disubstituted at position 20 is AIB. In other exemplary aspects, the α,α-disubstituted at position 20 is ACPC.

[1341] In exemplary aspects, the glucagon analog comprises up to ten additional modifications, relative to SEQ ID NO: 1. In exemplary aspects, the glucagon analog comprises an amino acid substitution, relative to SEQ ID NO: 1, at one or more of positions 2, 12, 17, 18, 21, 24, 27, 28, and 29. In exemplary aspects, the glucagon analog comprises one or more of:
[1342] i. a DPP-IV protective amino acid at position 2; optionally AIB or D-Ser;
[1343] ii. a large, aliphatic, nonpolar amino acid at position 12, optionally Ile;
[1344] iii. an amino acid other than Arg at position 17, optionally Gln;
[1345] iv. a small aliphatic amino acid at position 18, optionally Ala;
[1346] v. an amino acid other than Asp at position 21, optionally Glu;
[1347] vi. an amino acid other than Gln at position 24, optionally Asn or Ala;
[1348] vii. an amino acid other than Met at position 27, optionally Leu;
[1349] viii. an amino acid other than Asn at position 28, optionally Ala;
[1350] ix. an amino acid other than Thr at position 29, optionally Gly; and
[1351] x. an extension of 1 to 21 amino acids C-terminal to the amino acid at position 29.

[1352] In exemplary aspects, the glucagon analog comprises an extension of GPSSGAPPPS or GPSSGAPPPSC.

[1353] In exemplary aspects, the glucagon analog comprising a His at position 1, Lys at position 16 and AIB at position 20 does not comprise Gln-Ala at positions 17-18.

[1354] In other exemplary embodiments, the glucagon analog comprises an amino acid sequence of any of SEQ ID NOs: 48, 52, 53, and 74 of Int'l Appl. No. PCT/US11/66164 incorporated herein by reference in its entirety. Such glucagon analogs are similar in structure to those of SEQ ID NOs: 27-33, 35-41, 43-46, 76-80, 83-87, 89, and 90 of Int'l Appl. No. PCT/US11/66164 incorporated herein by reference in its entirety, except that the former glucagon analogs (SEQ ID NOs: 48, 52, 53, and 74) do not comprise an acylated amino acid or alkylated amino acid.

[1355] In yet other exemplary embodiments, the glucagon analog comprises an amino acid sequence of any of SEQ ID NOs: 50, 51, 54, 56, 58-60, 62-66, 68-70, 72, 73, 75, 81, 82, 88, and 92 or any of SEQ ID NOs: 114-119, 125, 126, and 133, or any of SEQ ID NOs: 139-144, 150-153, 208, 210, and 211, all SEQ ID NOs with reference to Int'l Appl. No. PCT/US11/66164 incorporated herein by reference in its entirety. Such glucagon analogs comprise a large, aromatic amino acid at position 1, e.g., Tyr.

[1356] In some embodiments, the glucagon superfamily peptide comprises an amino acid sequence of any of SEQ ID NOs: 27-33, 35-41, 43-46, 76-80, 83-87, 89, 90, 94-100, 102-112, 120-124, and 127-131, or any of SEQ ID NOs: 48, 52, 53, and 74, or any of SEQ ID NOs: 50, 51, 54, 56, 58-60, 62-66, 68-70, 72, 73, 75, 81, 82, 88, 92, 114-119, 125, 126, and 133, all SEQ ID NOs with reference to Intl Appl. No. PCT/US11/66164 incorporated herein by reference in its entirety. In some embodiments, the GIP agonist peptide comprises an amino acid sequence of any of SEQ ID NOs: 28, 29, 31, 37-41, 79, 80, 89, 90, 95, 130, 145-152, 155-167, 171, 176, 177, 180, 203-207, 212, and 230 of Int'l Appl. No. PCT/US11/66164 incorporated herein by reference in its entirety.

[1357] In some embodiments, the glucagon superfamily peptides comprise a structure based on a parent sequence comprising any of SEQ ID NOs: 27-33, 35-41, 43-46, 76-80, 83-87, 89, 90, 94-100, 102-112, 120-124, and 127-131, or any of SEQ ID NOs: 48, 52, 53, and 74, or any of SEQ ID NOs: 50, 51, 54, 56, 58-60, 62-66, 68-70, 72, 73, 75, 81, 82, 88, 92, 114-119, 125, 126, and 133, or any of SEQ ID NOs: 28, 29, 31, 37-41, 79, 80, 89, 90, 95, 130, 145-152, 155-167, 171, 176, 177, 180, 203-207, 212, and 230, all SEQ ID NOs with reference to Int'l Appl. No. PCT/US11/66164 incorporated herein by reference in its entirety, but differs from the parent sequence at one or more positions.

[1358] In some or any embodiments, the peptide of the present disclosures is an analog of a parent sequence comprising any of SEQ ID NOs: 27-33, 35-41, 43-46, 76-80, 83-87, 89, 90, 94-100, 102-112, 120-124, and 127-131, or any of SEQ ID NOs: 48, 52, 53, and 74, or any of SEQ ID NOs: 50, 51, 54, 56, 58-60, 62-66, 68-70, 72, 73, 75, 81, 82, 88, 92, 114-119, 125, 126, and 133, or any of SEQ ID NOs: 28, 29, 31, 37-41, 79, 80, 89, 90, 95, 130, 145-152, 155-167, 171, 176, 177, 180, 203-207, 212, and 230, all SEQ ID NOs with reference to Int'l Appl. No. PCT/US11/66164 incorporated herein by reference in its entirety, comprising an amino acid sequence based on the amino acid sequence of the parent sequence but differs from the parent sequence inasmuch as the amino acid sequence of the analog comprises one or more (e.g., 1, 2, 3, 4, 5, 6, 7, 8, 9, 10, 11, 12, 13, 14, 15, and in some instances, 16 or more (e.g., 17, 18, 19, 20, 21, 22, 23, 24, 25, etc.), specified or optional amino acid modifications. In some or any embodiments, the peptide of the present disclosures comprises a total of 1, up to 2, up to 3, up to 4, up to 5, up to 6, up to 7, up to 8, up to 9, or up to 10 additional amino acid modifications relative to the parent sequence comprising any of SEQ ID NOs: 27-33, 35-41, 43-46, 76-80, 83-87, 89, 90, 94-100, 102-112, 120-124, and 127-131, or any of SEQ ID NOs: 48, 52, 53, and 74, or any of SEQ ID NOs: 50, 51, 54, 56, 58-60, 62-66, 68-70, 72, 73, 75, 81, 82, 88, 92, 114-119, 125, 126, and 133, or any of SEQ ID NOs: 28, 29, 31, 37-41, 79, 80, 89, 90, 95, 130, 145-152, 155-167, 171, 176, 177, 180, 203-207, 212, and 230 of Int'l Appl. No. PCT/US11/66164 incorporated herein by reference in its entirety. In some or any embodiments, the modifications are any of those described herein with regard to glucagon analogs, e.g., acylation, alkylation, pegylation, truncation at C-terminus, substitution of the amino acid at one or more of positions 1, 2, 3, 7, 10, 12, 15, 16, 17, 18, 19, 20, 21, 23, 24, 27, 28, and 29.

[1359] In some or any embodiments, the modification is an amino acid substitution or replacement, e.g., a conservative amino acid substitution. In some aspects, the conservative substitution is a replacement of the amino acid at one or more of positions 2, 5, 7, 10, 11, 12, 13, 14, 16, 17, 18, 19, 20, 21, 24, 27, 28 or 29. In alternative embodiments, the amino acid substitution is not a conservative amino acid substitution, e.g., is a non-conservative amino acid substitution.

[1360] In some embodiments, the peptide of the present disclosures comprises an amino acid sequence which has at least 25% sequence identity to the amino acid sequence of the parent sequence, which comprises any of SEQ ID NOs: 27-33, 35-41, 43-46, 76-80, 83-87, 89, 90, 94-100, 102-112, 120-124, and 127-131, or any of SEQ ID NOs: 48, 52, 53, and 74, or any of SEQ ID NOs: 50, 51, 54, 56, 58-60, 62-66, 68-70, 72, 73, 75, 81, 82, 88, 92, 114-119, 125, 126, and 133, or any of SEQ ID NOs: 28, 29, 31, 37-41, 79, 80, 89, 90, 95, 130, 145-152, 155-167, 171, 176, 177, 180, 203-207, 212, and 230, all SEQ ID Nos with reference to Int'l Appl. No. PCT/US11/66164 incorporated herein by reference in its entirety. In some embodiments, the peptide of the present disclosures comprises an amino acid sequence which is at least 30%, at least 40%, at least 50%, at least 60%, at least 70%, at least 80%, at least 85%, at least 90% or has greater than 90% sequence identity to the parent sequence. In some embodiments, the amino acid sequence of the presently disclosed peptide which has the above-referenced % sequence identity is the full-length amino acid sequence of the presently disclosed peptide. In some embodiments, the amino acid sequence of the peptide of the present disclosures which has the above-referenced % sequence identity is only a portion of the amino acid sequence of the presently disclosed peptide. In some embodiments, the presently disclosed peptide comprises an amino acid sequence which has about A % or greater sequence identity to a reference amino acid sequence of at least 5 contiguous amino acids (e.g., at least 6, at least 7, at least 8, at least 9, at least 10 amino acids) of the parent sequence, wherein the reference amino acid sequence begins with the amino acid at position C of SEQ ID NO: 1 and ends with the amino acid at position D of SEQ ID NO: 1, wherein A is 25, 30, 35, 40, 45, 50, 55, 60, 65, 70, 75, 80, 85, 90, 91, 92, 93, 94, 95, 96, 97, 98, 99; C is 1, 2, 3, 4, 5, 6, 7, 8, 9, 10, 11, 12, 13, 14, 15, 16, 17, 18, 19, 20, 21, 22, 23, 24, 25, 26, 27, or 28 and D is 5, 6, 7, 8, 9, 10, 11, 12, 13, 14, 15, 16, 17, 18, 19, 20, 21, 22, 23, 24, 25, 26, 27, 28 or 29. Any and all possible combinations of the foregoing parameters are envisioned, including but not limited to, e.g., wherein A is 90% and C and D are 1 and 27, or 6 and 27, or 8 and 27, or 10 and 27, or 12 and 27, or 16 and 27.

[1361] The analogs of the parent sequence comprising any of SEQ ID NOs: 27-33, 35-41, 43-46, 76-80, 83-87, 89, and 90, or any of SEQ ID NOs: 48, 52, 53, and 74, or any of SEQ ID NOs: 50, 51, 54, 56, 58-60, 62-66, 68-70, 72, 73, 75, 81, 82, 88, and 92, or any of comprising any of SEQ ID NOs: 28, 29, 31, 37-41, 79, 80, 89, 90, 95, 130, 145-152, 155-167, 171, 176, 177, 180, 203-207, 212, and 230, all SEQ ID NOs with reference to Int'l Appl. No. PCT/US11/66164 incorporated herein by reference in its entirety, described herein may comprise a peptide backbone of any number of amino acids, i.e., can be of any peptide length. In some embodiments, the peptides described herein are the same length as SEQ ID NO: 1, i.e., are 29 amino acids in length. In some embodiments, the presently disclosed peptide is longer than 29 amino acids in length, e.g., the presently disclosed peptide comprises a C-terminal extension of 1-21 amino acids, as further described herein. Accordingly, the peptide of the present disclosures in some embodiments, is 30, 31, 32, 33, 34, 35, 36, 37, 38, 39, 40, 41, 42, 43, 44, 45, 46, 47, 48, 49, or 50 amino acids in length. In some embodiments, the presently disclosed peptide is up to 50 amino acids in length. In some embodiments, the presently disclosed peptide is longer than 29 amino acids in length (e.g., greater than 50 amino acids, (e.g., at least or about 60, at least or about 70, at least or about 80, at least or about 90, at least or about 100, at least or about 150, at least or about 200, at least or about 250, at least or about 300, at least or about 350, at least or about 400, at least or about 450, at least or about 500 amino acids in length) due to fusion with another peptide. In other embodiments, the presently disclosed peptide is less than 29 amino acids in length, e.g., 28, 27, 26, 25, 24, 23, amino acids.

[1362] In accordance with the foregoing, in some aspects, the peptide of the present disclosures is an analog of a parent sequence comprising any of SEQ ID NOs: 27-33, 35-41, 43-46, 76-80, 83-87, 89, 90, 94-100, 102-112, 120-124, and 127-131, or any of SEQ ID NOs: 48, 52, 53, and 74, or any of SEQ ID NOs: 50, 51, 54, 56, 58-60, 62-66, 68-70, 72, 73, 75, 81, 82, 88, 92, 114-119, 125, 126, and 133, or any of SEQ ID NOs: 28, 29, 31, 37-41, 79, 80, 89, 90, 95, 130, 145-152, 155-167, 171, 176, 177, 180, 203-207, 212, and 230, all SEQ ID NOs with reference to Int'l Appl. No. PCT/US11/66164 incorporated herein by reference in its entirety, which sequence of the analog comprises one or more amino acid modifications which affect GIP activity, glucagon activity, and/or GLP-1 activity, enhance stability, e.g., by reducing degradation of the peptide (e.g., by improving resistance to DPP-IV proteases), enhance solubility, increase half-life, delay the onset of action, extend the duration of action at the GIP, glucagon, or GLP-1 receptor, or a combination of any of the foregoing. Such amino acid modifications, in addition to other modifications, are further described herein with regard to glucagon analogs, and any of these modifications can be applied individually or in combination.

### Further Exemplary Embodiments

[1363] In exemplary embodiments, the peptide of the present disclosures is an analog of glucagon (SEQ ID NO: 1) comprising (i) at position 1 an amino acid comprising an imidazole side chain, (ii) at position 2 a DPP-IV protective amino acid, (iii) at any of positions 9, 10, 12, 16, 20, or 37-43 an acylated amino acid or alkylated amino acid, optionally, wherein the acyl or alkyl group is linked to the amino acid via a spacer; (iv) at position 20 an amino acid selected from the group consisting of: (i) an α,α-disubstituted amino acid; and (ii) an amino acid comprising an imidazole side chain; and (v) up to ten additional amino acid modifications relative to SEQ ID NO: 1, wherein, when the glucagon analog is not conjugated to a heterologous moiety, e.g., a hydrophilic moiety (e.g., PEG), the glucagon analog exhibits at least or about 0.1% (e.g., at least or about 1%, at least or about 10%, at least or about 50%, at least about 80%, at least or about 100%, at least or about 500%) activity of native GIP at the GIP receptor.

[1364] The glucagon analogs described here may comprise any activity profile described herein. In exemplary aspects, the glucagon analog exhibits a GIP percentage potency of at least or about 1%, at least or about 10%, at least or about 50%, at least or about 90%, at least or about 100%, at least or about 300%, or at least or about 500%. In some aspects, the glucagon analog also exhibits a GLP-1 percentage potency of at least or about 1%, at least or about 10%, at least or about 50%, at least or about 90%, at least or about 100%, at least or about 300%, or at least or about 500%. In alternative or additional aspects, the glucagon analog exhibits a glucagon percentage potency of at least or about 1%, at least or about 10%, at least or about 50%, at least or about 90%, or at least or about 100%. Accordingly, while the glucagon analogs may be considered as GIP agonist peptides, in some aspects, the glucagon analogs additionally may be considered as a GIP-GLP-1 co-agonist, a GIP-glucagon co-agonist, or a GIP-GLP-1-glucgaon triagonist. For example, the peptide may exhibit agonist activity at each of the human GIP receptor, the human GLP-1 receptor and optionally the human glucagon receptor, wherein the peptide exhibits an EC50 at the GIP receptor which is within 100-fold (e.g., 50-fold, 40-fold, 30-fold, 20-fold, 15-fold, 10-fold, or less) of its EC50 at the GLP-1 receptor and optionally is within 100-fold (e.g., 50-fold, 40-fold, 30-fold, 20-fold, 15-fold, 10-fold, or less) of its EC50 at the glucagon receptor.

[1365] In exemplary embodiments, the glucagon analog comprises an amino acid comprising an imidazole side chain at position 1. In exemplary aspects, the amino acid at position 1 comprises a structure of Formula A

[chemical structure]

wherein each of R1 and R2 independently is selected from the group consisting of H, (C1-6)alkyl, O(C1-6)alkyl, (C1-6)alkyl-OH, F, and (C1-C6)alkyl of which at least one H is replaced by F. In exemplary aspects, the amino acid at position 1 comprises an analog structure of Formula A, wherein one or both of the ring nitrogens are attached to a C1-C3 alkyl.

[1366] In exemplary aspects, the amino acid at position 1 is the native residue of glucagon (SEQ ID NO: 1) L-histidine (His), or is a derivative of His (His derivative), e.g., a derivative of His in which the alpha atoms are modified. As used herein, the term “His derivative” refers to a chemical moiety comprising an imidazole, e.g., comprising a structure of Formula A, or a substituted imidazole, attached to at least one carbon atom. In exemplary embodiments, the His derivative comprises a structure similar to the structure of histidine, except that the alpha amine, alpha carbon, or alpha carboxylate is replaced with another chemical moiety. In exemplary embodiments, the His derivative is an alpha substituted histidine of which the hydrogen atom linked to the alpha carbon is substituted with another chemical moiety, e.g., methyl, ethyl, propyl, isopropyl, hydroxyl, methoxy, ethoxy, and the like. The His derivative in some aspects is D-histidine, desaminohistidine, hydroxyl-histidine, acetyl-histidine, homo-histidine, N-methyl histidine, alpha-methyl histidine, imidazole acetic acid, or alpha, alpha-dimethyl imidiazole acetic acid (DMIA).

[1367] In some aspects, the DPP-IV protective amino acid at position 2 is one of D-serine, D-alanine, valine, glycine, N-methyl serine, N-methyl alanine, or alpha, aminoisobutyric acid (AIB). In some aspects, the DPP-IV protective amino acid is D-Ser, or a conservative amino acid substitution thereof, or an α,α-disubstituted amino acid. In some aspects, the α,α-disubstituted amino acid comprises R1 and R2, each of which is bonded to the alpha carbon, wherein each of R1 and R2 is independently selected from the group consisting of C1-C4 alkyl, optionally substituted with a hydroxyl, amide, thiol, halo, or R1 and R2 together with the alpha carbon to which they are attached form a ring. In some aspects, the α,α-disubstituted amino acid is AIB. In exemplary aspects, when the DPP-IV protective amino acid is D-Ser, the GIP agonist peptide is not conjugated to a heterologous moiety, e.g., a hydrophilic moiety (e.g., PEG). In other aspects of the present disclosures, the DPP-IV protective amino acid is not D-serine.

[1368] In exemplary aspect, the analog of glucagon (SEQ ID NO: 1) of the present disclosures comprises at position 20 an α,α-disubstituted amino acid. In exemplary aspects, the α,α-disubstituted amino acid comprises R1 and R2, each of which is bonded to the alpha carbon, wherein each of R1 and R2 is independently selected from the group consisting of C1-C4 alkyl, optionally substituted with a hydroxyl, amide, thiol, halo, or R1 and R2 together with the alpha carbon to which they are attached form a ring. In some embodiments, the α,α-disubstituted amino acid is 1-aminocyclopropane-1-carboxylate (ACPC). In some aspects, the α,α-disubstituted at position 20 is AIB. In exemplary embodiments, the amino acid at position 16 is a charged amino acid, e.g., a positive-charged amino acid, negative charged amino acid. In some aspects, when the amino acid at position 20 is an alpha, alpha disubstituted amino acid, the amino acid at position 16 is a positive-charged amino acid of Formula IV, e.g., Lys, or is a negative-charged amino acid, e.g., Glu. In some aspects, when the amino acid at position 20 is an alpha, alpha disubstituted amino acid, the amino acid at position 16 is a charge neutral amino acid, e.g., Ser, Ala, Gly. In exemplary aspects, the amino acid at position 16 is a small aliphatic amino acid (e.g., Ala), an α,α-disubstituted amino acid (e.g, AIB), or an amino acid comprising an imidazole side chain (e.g., His). In exemplary aspects, the glucagon analog comprises at position 17 of the glucagon analog an Arg, Gln, or an amino acid comprising an imidazole side chain, optionally, His. In exemplary aspects, the glucagon analog comprises Ala at position 18 and Ala at position 19. In exemplary aspects, the glucagon analog comprises Glu at position 21. In exemplary aspects, the glucagon analog comprises a Leu or Nle at position 27, an Asp or Glu at position 28, and a Gly at position 29. In exemplary aspects, the glucagon analog comprises a C-terminal extension of 1-21 amino acids C-terminal to the amino acid at position 29. In exemplary aspects, the glucagon analog comprises a C-terminal amide in place of the alpha carboxylate of the C-terminal residue.

[1369] In exemplary aspects, the analog of glucagon (SEQ ID NO: 1) of the present disclosures comprises at position 20 an amino acid comprising an imidazole side chain. In exemplary aspects, the amino acid comprising an imidazole side chain comprises a structure of Formula A:

[chemical structure]

wherein each of R1 and R2 independently is selected from the group consisting of H, (C1-6)alkyl, O(C1-6)alkyl, (C1-6)alkyl-OH, F, and (C1-C6)alkyl of which at least one H is replaced by F. Suitable amino acids comprising an imidazole side chain are described herein. In exemplary aspects, the amino acid at position 20 comprises an analog structure of Formula A, wherein one or both of the ring nitrogens are attached to a C1-C3 alkyl. In some aspects, the amino acid at position 20 is His or a His derivative. In exemplary aspects, the glucagon analog comprises at position 16 a negative charged amino acid, e.g., Glu. In exemplary aspects, the glucagon analog comprises at position 17 of the glucagon analog an Arg, Gln, or an amino acid comprising an imidazole side chain, optionally, His. In exemplary aspects, the glucagon analog comprises Ala at position 18 and Ala at position 19. In exemplary aspects, the glucagon analog comprises a Leu or Nle at position 27, an Asp or Glu at position 28, and a Gly at position 29. In exemplary aspects, the glucagon analog comprises a C-terminal extension of 1-21 amino acids C-terminal to the amino acid at position 29. In exemplary aspects, the glucagon analog comprises a C-terminal amide in place of the alpha carboxylate of the C-terminal residue.

[1370] In exemplary embodiments, the peptide of the present disclosures is an analog of glucagon (SEQ ID NO: 1) comprising (i) an amino acid selected from the group consisting of: Ala, Leu, Ile, Val, norvaline, homoserine, Met, and methionine sulfone, at position 3; (ii) at any of positions 9, 10, 12, 16, 20, or 37-43 an acylated amino acid or alkylated amino acid, optionally, wherein the acyl or alkyl group is linked to the amino acid via a spacer; (iii) an alpha helix stabilizing amino acid at one or more of positions 16-21, and (v) up to ten additional amino acid modifications relative to SEQ ID NO: 1, wherein, when the glucagon analog is not conjugated to a heterologous moiety, e.g., a hydrophilic moiety (e.g., PEG), the glucagon analog exhibits at least or about 0.1% (e.g., at least or about 1%, at least or about 10%, at least or about 50%, at least about 80%, at least or about 100%, at least or about 500%) activity of native GIP at the GIP receptor.

[1371] The glucagon analogs comprising an amino acid modification which confers reduced activity at the glucagon receptor may comprise any activity profile described herein. In exemplary aspects, the glucagon analog exhibits a GIP percentage potency of at least or about 1%, at least or about 10%, at least or about 50%, at least or about 90%, at least or about 100%, at least or about 300%, or at least or about 500%. In some aspects, the glucagon analog also exhibits a GLP-1 percentage potency of at least or about 1%, at least or about 10%, at least or about 50%, at least or about 90%, at least or about 100%, at least or about 300%, or at least or about 500%. Accordingly, while the glucagon analogs may be considered as GIP agonist peptides, in some aspects, the glucagon analogs additionally may be considered as a GIP-GLP-1 co-agonist. For example, the peptide may exhibits agonist activity at the human GIP receptor and the human GLP-1 receptor, wherein the peptide exhibits an EC50 at the GIP receptor which is within 100-fold (e.g., 50-fold, 40-fold, 30-fold, 20-fold, 15-fold, 10-fold, or less) of its EC50 at the GLP-1 receptor.

[1372] In exemplary embodiments, the glucagon analog comprises an amino acid comprising an imidazole side chain at position 1. In exemplary aspects, the amino acid at position 1 comprises a structure of Formula A

[chemical structure]

wherein each of R1 and R2 independently is selected from the group consisting of H, (C1-6)alkyl, O(C1-6)alkyl, (C1-6)alkyl-OH, F, and (C1-C6)alkyl of which at least one H is replaced by F. In exemplary aspects, the amino acid at position 1 comprises an analog structure of Formula A, wherein one or both of the ring nitrogens are attached to a C1-C3 alkyl.

[1373] In exemplary aspects, the amino acid at position 1 is the native residue of glucagon (SEQ ID NO: 1) L-histidine (His), or is a derivative of His (His derivative), e.g., a derivative of His in which the alpha atoms are modified. As used herein, the term “His derivative” refers to a chemical moiety comprising an imidazole, e.g., comprising a structure of Formula A, or a substituted imidazole, attached to at least one carbon atom. In exemplary embodiments, the His derivative comprises a structure similar to the structure of histidine, except that the alpha amine, alpha carbon, or alpha carboxylate is replaced with another chemical moiety. In exemplary embodiments, the His derivative is an alpha substituted histidine of which the hydrogen atom linked to the alpha carbon is substituted with another chemical moiety, e.g., methyl, ethyl, propyl, isopropyl, hydroxyl, methoxy, ethoxy, and the like. The His derivative in some aspects is D-histidine, desaminohistidine, hydroxyl-histidine, acetyl-histidine, homo-histidine, N-methyl histidine, alpha-methyl histidine, imidazole acetic acid, or alpha, alpha-dimethyl imidiazole acetic acid (DMIA).

[1374] In some aspects, the glucagon analogs comprises a DPP-IV protective amino acid at position 2. In exemplary aspects, the DPP-IV protective amino acid is one of D-serine, D-alanine, valine, glycine, N-methyl serine, N-methyl alanine, or alpha, aminoisobutyric acid (AIB). In some aspects, the DPP-IV protective amino acid is D-Ser, or a conservative amino acid substitution thereof, or an α,α-disubstituted amino acid. In some aspects, the α,α-disubstituted amino acid comprises R1 and R2, each of which is bonded to the alpha carbon, wherein each of R1 and R2 is independently selected from the group consisting of C1-C4 alkyl, optionally substituted with a hydroxyl, amide, thiol, halo, or R1 and R2 together with the alpha carbon to which they are attached form a ring. In some aspects, the α,α-disubstituted amino acid is AIB. In exemplary aspects, when the DPP-IV protective amino acid is D-Ser, the GIP agonist peptide is not conjugated to a heterologous moiety, e.g., a hydrophilic moiety (e.g., PEG). In other aspects of the present disclosures, the DPP-IV protective amino acid is not D-serine.

[1375] In exemplary aspects, the glucagon analog comprises an alpha helix stabilizing amino acid at one or more of positions 16-21. In exemplary aspects, the glucagon analog comprises at position 16 an alpha helix stabilizing amino acid, optionally, a negative charged amino acid (e.g., Glu) or an alpha, alpha disubstituted amino acid. In exemplary aspects the α,α-disubstituted amino acid comprises R1 and R2, each of which is bonded to the alpha carbon, wherein each of R1 and R2 is independently selected from the group consisting of C1-C4 alkyl, optionally substituted with a hydroxyl, amide, thiol, halo, or R1 and R2 together with the alpha carbon to which they are attached form a ring. In exemplary aspects, the α,α-disubstituted amino acid is AIB. In exemplary aspects, the glucagon analog comprises an Arg at position 17 and a small aliphatic amino acid, optionally, Ala, at position 18. In exemplary aspects, the glucagon analog is not modified at position 20 compared to SEQ ID NO: 1 and the amino acid at position 20 is Gln. In exemplary aspects, the glucagon analog comprises Glu at position 16, Arg at position 17, Ala at position 18, Ala at position 19, and Gln at position 20.

[1376] In exemplary aspects of the foregoing, the glucagon analog comprises an acylated or alkylated amino acid at any one of positions 9, 10, 12, 16, 20. In exemplary aspects, the glucagon analog comprises an amino acid covalently attached to a C12 to C18 acyl group or alkyl group at any one or more of positions 9, 10, 12, 13, 14, 16, 17, and 20. In exemplary aspects, the glucagon analog comprises an acylated or alkylated amino acid at position 10. In some aspects, the glucagon analog comprises an extension of 1 to 21 amino acids C-terminal to the amino acid at position 29 and comprises an acylated or alkylated amino acid at any of positions 37-43 (e.g., 37, 38, 39, 40, 41, 42, 43). In some aspects, the amino acid comprising a non-native acyl or alkyl group is at position 40.

[1377] In exemplary aspects of the foregoing, the glucagon analog comprises an extension of 1 to 21 amino acids C-terminal to the amino acid at position 29 and, in some aspects, the extension forms a structure known in the art as a Trp cage. In some aspects, the extension comprises the amino acid sequence GPSSGAPPPS (SEQ ID NO: 5) or GGPSSGAPPPS (SEQ ID NO: 6) or GPSSGRPPPS (SEQ ID NO:68) of U.S. Prov. App. 61/716,878 filed Oct. 22, 2012, incorporated by reference herein in its entirety, or a sequence of one of the foregoing with 1, 2, or 3 conservative amino acid substitutions. In exemplary aspects when the glucagon analog comprises an extension of 1 to 21 amino acids, the glucagon analog comprises a Gly at position 29.

[1378] In exemplary aspects, the acylated amino acid or alkylated amino acid comprises a structure of Formula I (optionally, Lys), Formula II, (optionally, Cys), or Formula III, (optionally, Ser). Optionally, in some aspects, the acylated amino acid or alkylated amino acid comprises a structure of Formula I, e.g., Lys.

[1379] In some aspects, the acylated amino acid or alkylated amino acid is linked to the acyl group or alkyl group via a spacer. In some aspects, the spacer is 3 to 10 atoms in length. In some aspects, the spacer is an amino acid or dipeptide, and, in some aspects, the spacer comprises one or two acidic amino acid residues, e.g., Glu. In some aspects, the acyl or alkyl group is linked to the amino acid via wherein the total length of the spacer and the acyl group is about 14 to about 28 atoms in length. In some aspects, the spacer comprises one or two gamma-Glu.

[1380] With regard to the acylated amino acid, the acyl group in some aspects is a C12 to C18 (e.g., C12, C13, C14, C15, C16, C17, C18) fatty acyl group. In some aspects, the acyl group is a C14 or C16 fatty acyl group.

[1381] In exemplary aspects of the foregoing embodiments, the glucagon analog comprises a Glu at position 15, position 21, or position 28, or at positions 15 and 21, at positions 15 and 28, or at positions 21 and 28, or at positions 15, 21, and 28.

[1382] In some aspects of the present disclosures, the glucagon analog comprises at least one charged amino acid C-terminal to the amino acid at position 27. For example, in some aspects, the glucagon analog comprises a charged amino acid (e.g., a negative charged amino acid) at position 28. The negative charged amino acid in some aspects is Asp or Glu. The negative charged amino acid in some aspects is Glu. In alternative aspects, the amino acid at position 28 is a positive charged amino acid, e.g., a positive charged amino acid is an amino acid of Formula I, e.g., Lys.

[1383] In alternative or additional aspects, the glucagon analog comprises an amino acid modification at position 27, at position 29, or at both positions 27 and 29. For example, the amino acid at position 27 is in some aspects is Leu, Nle, Val, or Lys and/or the amino acid at position 29 is in some aspects Gly or Thr.

[1384] In some aspects, the amino acid at position 28 is Asp and optionally, the amino acid at position 29 is an amino acid other than Gly, e.g., Val, Ala, or AIB.

[1385] The glucagon analogs described herein may comprise additional amino acid modifications, e.g., up to ten (e.g., 0, 1, 2, 3, 4, 5, 6, 7, 8, 9, 10) additional amino acid modifications, relative to SEQ ID NO: 1, as further discussed herein. In exemplary aspects, the glucagon analog comprises one or more of:
[1386] i. an Ile at position 7;
[1387] ii. an Ile or Arg at position 12;
[1388] iii. an aliphatic amino acid, optionally, Ala, at position 18;
[1389] iv. an acidic amino acid, optionally, Glu, at position 21;
[1390] v. an Asn, Ala, or AIB at position 24;
[1391] vi. an aliphatic amino acid, optionally, Ala, or Leu, or Nle, at position 27;
[1392] vii. an acidic amino acid, optionally, Glu, or an aliphatic amino acid, optionally, Ala, at position 28;
[1393] viii. an aliphatic amino acid, optionally, Ala, at position 29;
[1394] ix. amidation at the C-terminus.

[1395] In accordance with the foregoing, the glucagon analog in exemplary aspects comprises, consists essentially of, or consists of the amino acid sequence of any of SEQ ID NOs: 19, 21-26, 28, 287, 289-294, 296, 520, 522-527, and 529 or any of SEQ ID NOs: 30, 31, 32, 33, 35, 37, 38, 41, 298, 299, 300, 301, 303, 305, 306, 309, 531, 532, 533, 534, 536, 538, 539, and 542, all of these SEQ ID NOs with reference to U.S. Prov. App. 61/716,878 filed Oct. 22, 2012, incorporated by reference herein in its entirety.

[1396] The invention provides a peptide comprising the sequence of SEQ ID NO: 66 of U.S. Prov. App. 61/716,878 filed Oct. 22, 2012, incorporated by reference herein in its entirety,

(SEQ ID NO: 66)

HX₂X₃GTFTSDX₁₀SKYLX₁₅X₁₆X₁₇X₁₈X₁₉X₂₀X₂₁FVQWLX₂₇X₂₈
X₂₉X₃₀PSSGX₃₅PPPS

wherein:
[1397] X₂ is AIB;
[1398] X₃ is Gln or an amino acid comprising a side chain structure of Structure I, II, or III;
[1399] X₁₀ is Tyr or an amino acid covalently attached to a C12 to C18 acyl or alkyl group;
[1400] X₁₅ is an acidic amino acid, optionally, Glu or Asp;
[1401] X₁₆ is any amino acid, optionally, any amino acid other than Gly, Pro, and Ser; e.g., Glu, Ala, alpha, alpha-disubstituted amino acid (e.g., AIB), His, Lys,
[1402] X₁₇ is Arg, His, Gln;
[1403] X₁₈ is Arg or Ala;
[1404] X₁₉ is Ala or alpha, alpha disubstituted amino acid (e.g., AIB);
[1405] X₂₀ is a selected from group consisting of: alpha, alpha-disubstituted amino acid (e.g., AIB) or Gln or His, Lys, or Ala;
[1406] X₂₁ is an acidic amino acid, optionally, Asp or Glu;
[1407] X₂₇ is Leu, Ala, Nle, or Met;
[1408] X₂₈ is Ala or an acidic amino acid (optionally, Asp or Glu);
[1409] X₂₉ is aliphatic, e.g., Ala or Gly or AIB or Val;
[1410] X₃₀ is small aliphatic amino acid, e.g., Ala or Gly
[1411] X₃₅ is Ala or a basic amino acid (optionally, Arg or Lys);
[1412] wherein, when X₂₈ is an acidic amino acid, X₃₅ is a basic amino acid;
[1413] optionally, wherein, when X₂₈ is Asp, then X₂₉ is not Gly

[1414] wherein, when X₁₀ is Tyr, the peptide comprises at position 40 an amino acid covalently attached to a C12 to C18 acyl or alkyl group, wherein, optionally, the peptide comprises Gly at position 41, and

[1415] wherein the C-terminal amino acid of the peptide is amidated.

[1416] In exemplary aspects of the peptide of SEQ ID NO: 66, X₁₀ is an amino acid covalently attached to a C12 to C18 acyl or alkyl group. In exemplary aspects, X₂₈ is Glu and optionally, X₁₅ is Glu and/or X₂₁ is Glu. In exemplary aspects, each of positions 15, 21, and 28. In exemplary aspects, X₁₈ is Ala and X₁₉ is Ala and optionally, X₂₀ is an alpha, alpha-disubstituted amino acid, e.g., AIB. In exemplary aspects, X₁₆ is Glu, Ala, AIB, His, or Lys; X₁₇ is Arg, His or Gln, and X₂₁ is Glu. In alternative exemplary aspects, X₂₀ is Lys or His and optionally X₁₆ is Glu, X₁₇ is Arg, and X₂₁ is Asp. In alternative aspects, X₁₈ is Ala and X₁₉ is an alpha, alpha-disubstituted amino acid (e.g., AIB) and optionally, X₁₆ is Glu, X₁₇ is Arg, and X₂₁ is Glu. Also, in exemplary aspects, X₂₀ is Ala or Lys. In exemplary aspects of the peptide of SEQ ID NO: 66, X₂₉ is Ala, Gly, Val, or an alpha, alpha-disubstituted amino acid, optionally, AIB.

[1417] In exemplary aspects of the peptide of SEQ ID NO: 66, X₁₀ is Tyr and an amino acid covalently attached to a C12 to C18 acyl or alkyl group is located at position 40. In exemplary aspects, the peptide comprises Gly at position 41. In exemplary aspects, X₉ or X₁₅ is Glu.

[1418] In exemplary aspects of the peptide of SEQ ID NO: 66, the acyl or alkyl group is attached to an amino acid comprising a structure of Formula I, Formula II, or Formula III. In exemplary aspects, the amino acid of Formula I is Lys. Also, in exemplary aspects, the acyl or alkyl group is attached to an amino acid of the peptide via a spacer, optionally a spacer that is an amino acid of dipeptide. In exemplary aspects, the spacer is one or two acidic amino acid residues.

[1419] In exemplary aspects of the peptide of SEQ ID NO: 66, X₃ is Gln or acetyl diaminobutanoic acid or acetyl Lys or acetyl ornithine or methyl sulfoxide. In exemplary aspects, the peptide comprises Leu at position 27, Gly at position 29, and GPSSGAPPPS C-terminal to Gly at position 29.

[1420] In exemplary aspects, the peptide comprises the sequence of any one of SEQ ID NOs: 15-28, 34, 36, 39, 42, 43, 44, 52, 53, 63-65, 283-296, 302, 304, 307, 310, 311, 312, 320, 321, 330-332, 516-529, 535, 537, 540, 543, 544, 545, 553, 554, and 563-565 of U.S. Prov. App. 61/716,878 filed Oct. 22, 2012, incorporated by reference herein in its entirety.

[1421] The invention additionally provides a peptide comprising the sequence SEQ ID NO: 66 with up to 3 amino acid modifications relative to SEQ ID NO: 66, wherein the peptide exhibits agonist activity at the human GIP receptor and, the human GLP-1 receptor and/or the human glucagon receptor. The amino acid modifications may be any of those described herein.

[1422] The invention also provides a peptide comprising the sequence of
[1423] (a) the sequence of

X₁X₂X₃GTFTSDX₁₀SKYLX₁₅X₁₆X₁₇X₁₈X₁₉X₂₀X₂₁FVQWLX₂₇
X₂₈X₂₉X₃₀PSSGX₃₅PPPS

(SEQ ID NO: 67 in U.S. Prov. App. 61/716,878 filed Oct. 22, 2012, incorporated by reference herein in its entirety)
wherein:
[1424] X₁ is an amino acid comprising a side chain imidazole, optionally, a His or His derivative;
[1425] X₂ is a DPP-IV protective amino acid, optionally, an alpha, alpha-disubstituted amino acid (e.g., AIB);
[1426] X₃ is selected from the group consisting of Glu, Ala, Leu, Ile, Nle, Val, NorVal, homoserine, Met, methionine sulfoxide, methionine sulfone, acetyl-Orn, acetyl-diaminobutanoic acid, acetyl-Lys;
[1427] X₁₀ is an amino acid covalently attached to a C12 to C18 acyl or alkyl group;
[1428] X₁₅ is an acidic amino acid, optionally, Glu or Asp;
[1429] X₁₆ is any amino acid, optionally, any amino acid other than Gly, Pro, and Ser; (e.g., Glu, Ala, alpha, alpha-disubstituted amino acid (e.g., AIB), His, Lys)
[1430] X₁₇ is Arg, His, Gln;
[1431] X₁₈ is Arg or Ala;
[1432] X₁₉ is Ala or alpha, alpha disubstituted amino acid;
[1433] X₂₀ is a selected from group consisting of: alpha, alpha-disubstituted amino acid (e.g., AIB) or Gln or His, Lys, or Ala;
[1434] X₂₁ is an acidic amino acid, optionally, Asp or Glu;
[1435] X₂₇ is Leu, Ala, Nle, or Met;
[1436] X₂₈ is Ala or an acidic amino acid (optionally, Asp or Glu);
[1437] X₂₉ is aliphatic, e.g., Ala or Gly or AIB or Val;
[1438] X₃₀ is small aliphatic amino acid, e.g., Ala or Gly
[1439] X₃₅ is Ala or a basic amino acid (optionally, Arg or Lys);
   wherein, when X₂₈ is an acidic amino acid, X₃₅ is a basic amino acid; optionally, wherein, when X₂₈ is Asp, then X₂₉ is not Gly
   wherein, when X₁₀ is Tyr, the peptide comprises at position 40 an amino acid covalently attached to a C12 to C18 acyl or alkyl group, and, wherein, optionally, the peptide comprises Gly at position 41,
   wherein the C-terminal amino acid of the peptide is amidated.

[1440] In exemplary aspects of the peptide comprising SEQ ID NO: 67, the peptide comprises: X₁ is His; X₂ is AIB; X₁₆ is Glu; X₁₇ is Arg; X₁₈ is Ala; X₁₉ is Ala; X₂₀ is Gln; X₂₇ is Leu; X₂₉ is Gly; X₃₀ is Gly; X₃₅ is Ala; or a combination thereof. In exemplary aspects, the peptide comprises the sequence of: SEQ ID NO: 29-42, 297-310, and 530-543 of U.S. Prov. App. 61/716,878 filed Oct. 22, 2012, incorporated by reference herein in its entirety.

[1441] The invention additionally provides a peptide comprising the sequence SEQ ID NO: 67 with up to 3 amino acid modifications relative to SEQ ID NO: 67, wherein the peptide exhibits agonist activity at the human GIP receptor and, the human GLP-1 receptor and/or the human glucagon receptor. The amino acid modifications may be any of those described herein.

[1442] The invention further provides a peptide comprising the sequence of SEQ ID NO: 18 of U.S. Prov. App. 61/716,878 filed Oct. 22, 2012, incorporated by reference herein in its entirety. In exemplary aspects, the peptide consists essentially of or consists of SEQ ID NO: 18.

[1443] A peptide comprising the sequence of SEQ ID NO: 43 of U.S. Prov. App. 61/716,878 filed Oct. 22, 2012, incorporated by reference herein in its entirety, is also provided by the invention. In exemplary aspects, the peptide consists essentially of or consists of SEQ ID NO: 43.

[1444] Also provided herein is a peptide comprising a sequence of SEQ ID NO: 18 with up to 3 amino acid modifications relative to SEQ ID NO: 18 or a sequence of SEQ ID NO: 43 with up to 3 amino acid modifications relative to SEQ ID NO: 43, wherein the peptide exhibits agonist activity at the human GIP receptor and the human GLP-1 receptor.

[1445] The invention also provides a peptide comprising a sequence of any one of SEQ ID NOs: 100-282; or SEQ ID NOs: 333-515 of U.S. Prov. App. 61/716,878 filed Oct. 22, 2012, incorporated by reference herein in its entirety. Also provided is a peptide comprising a sequence of any one of SEQ ID NOs: 100-282; SEQ ID NOs: 333-515 of U.S. Prov. App. 61/716,878 filed Oct. 22, 2012, incorporated by reference herein in its entirety with up to 3 amino acid modifications relative to SEQ ID NO: 43 of U.S. Prov. App. 61/716,878 filed Oct. 22, 2012, incorporated by reference herein in its entirety, wherein the peptide exhibits agonist activity at the human GIP receptor and the human GLP-1 receptor.

[1446] In some embodiments, the glucagon analog comprises a structure based on a parent sequence comprising any one of SEQ ID NOs: 15-42, 43, 44, 52, 53, 63-65, 100-312, 320, 321, 330-543, 544, 545, 553, 554, and 563-565, each SEQ ID NO with reference to U.S. Prov. App. 61/716,878 filed Oct. 22, 2012, incorporated by reference herein in its entirety, but differs from the parent sequence at one or more positions.

[1447] In some or any embodiments, the peptide of the present disclosures is an analog of a parent sequence comprising any of SEQ ID NOs: 15-42, 43, 44, 52, 53, 63-65, 100-312, 320, 321, 330-543, 544, 545, 553, 554, and 563-565 (each SEQ ID NO with reference to U.S. Prov. App. 61/716,878 filed Oct. 22, 2012, incorporated by reference herein in its entirety) comprising an amino acid sequence based on the amino acid sequence of the parent sequence but differs from the parent sequence inasmuch as the amino acid sequence of the analog comprises one or more (e.g., 1, 2, 3, 4, 5, 6, 7, 8, 9, 10, 11, 12, 13, 14, 15, and in some instances, 16 or more (e.g., 17, 18, 19, 20, 21, 22, 23, 24, 25, etc.), specified or optional amino acid modifications. In some or any embodiments, the peptide of the present disclosures comprises a total of 1, up to 2, up to 3, up to 4, up to 5, up to 6, up to 7, up to 8, up to 9, or up to 10 additional amino acid modifications relative to the parent sequence comprising any of SEQ ID NOs: 15-42, 43, 44, 52, 53, 63-65, 100-312, 320, 321, 330-543, 544, 545, 553, 554, and 563-565. In some or any embodiments, the modifications are any of those described herein with regard to glucagon analogs, e.g., acylation, alkylation, pegylation, truncation at C-terminus, substitution of the amino acid at one or more of positions 1, 2, 3, 7, 10, 12, 15, 16, 17, 18, 19, 20, 21, 23, 24, 27, 28, and 29.

[1448] In some or any embodiments, the modification is an amino acid substitution or replacement, e.g., a conservative amino acid substitution. In some aspects, the conservative substitution is a replacement of the amino acid at one or more of positions 2, 5, 7, 10, 11, 12, 13, 14, 16, 17, 18, 19, 20, 21, 24, 27, 28 or 29. In alternative embodiments, the amino acid substitution is not a conservative amino acid substitution, e.g., is a non-conservative amino acid substitution.

[1449] In some embodiments, the peptide of the present disclosures comprises an amino acid sequence which has at least 25% sequence identity to the amino acid sequence of the parent sequence, which comprises any of SEQ ID NOs: 15-42, 43, 44, 52, 53, 63-65, 100-312, 320, 321, 330-543, 544, 545, 553, 554, and 563-565 of U.S. Prov. App. 61/716,878 filed Oct. 22, 2012, incorporated by reference herein in its entirety. In some embodiments, the peptide of the present disclosures comprises an amino acid sequence which is at least 30%, at least 40%, at least 50%, at least 60%, at least 70%, at least 80%, at least 85%, at least 90% or has greater than 90% sequence identity to the parent sequence. In some embodiments, the amino acid sequence of the presently disclosed peptide which has the above-referenced % sequence identity is the full-length amino acid sequence of the presently disclosed peptide. In some embodiments, the amino acid sequence of the peptide of the present disclosures which has the above-referenced % sequence identity is only a portion of the amino acid sequence of the presently disclosed peptide. In some embodiments, the presently disclosed peptide comprises an amino acid sequence which has about A % or greater sequence identity to a reference amino acid sequence of at least 5 contiguous amino acids (e.g., at least 6, at least 7, at least 8, at least 9, at least 10 amino acids) of the parent sequence, wherein the reference amino acid sequence begins with the amino acid at position C of SEQ ID NO: 1 and ends with the amino acid at position D of SEQ ID NO: 1, wherein A is 25, 30, 35, 40, 45, 50, 55, 60, 65, 70, 75, 80, 85, 90, 91, 92, 93, 94, 95, 96, 97, 98, 99; C is 1, 2, 3, 4, 5, 6, 7, 8, 9, 10, 11, 12, 13, 14, 15, 16, 17, 18, 19, 20, 21, 22, 23, 24, 25, 26, 27, or 28 and D is 5, 6, 7, 8, 9, 10, 11, 12, 13, 14, 15, 16, 17, 18, 19, 20, 21, 22, 23, 24, 25, 26, 27, 28 or 29. Any and all possible combinations of the foregoing parameters are envisioned, including but not limited to, e.g., wherein A is 90% and C and D are 1 and 27, or 6 and 27, or 8 and 27, or 10 and 27, or 12 and 27, or 16 and 27.

[1450] The analogs of the parent sequence comprising any of SEQ ID NOs: 15-42, 43, 44, 52, 53, 63-65, 100-312, 320, 321, 330-543, 544, 545, 553, 554, and 563-565 U.S. Prov. App. 61/716,878 filed Oct. 22, 2012, incorporated by reference herein in its entirety described herein may comprise a peptide backbone of any number of amino acids, i.e., can be of any peptide length. In some embodiments, the peptides described herein are the same length as SEQ ID NO: 1, i.e., are 29 amino acids in length. In some embodiments, the presently disclosed peptide is longer than 29 amino acids in length, e.g., the presently disclosed peptide comprises a C-terminal extension of 1-21 amino acids, as further described herein. Accordingly, the peptide of the present disclosures in some embodiments, is 30, 31, 32, 33, 34, 35, 36, 37, 38, 39, 40, 41, 42, 43, 44, 45, 46, 47, 48, 49, or 50 amino acids in length. In some embodiments, the presently disclosed peptide is up to 50 amino acids in length. In some embodiments, the presently disclosed peptide is longer than 29 amino acids in length (e.g., greater than 50 amino acids, (e.g., at least or about 60, at least or about 70, at least or about 80, at least or about 90, at least or about 100, at least or about 150, at least or about 200, at least or about 250, at least or about 300, at least or about 350, at least or about 400, at least or about 450, at least or about 500 amino acids in length) due to fusion with another peptide. In other embodiments, the presently disclosed peptide is less than 29 amino acids in length, e.g., 28, 27, 26, 25, 24, 23, amino acids.

In accordance with the foregoing, in some aspects, the peptide of the present disclosures is an analog of a parent sequence comprising any of SEQ ID NOs: 15-42, 43, 44, 52, 53, 63-65, 100-312, 320, 321, 330-543, 544, 545, 553, 554, and 563-565 of U.S. Prov. App. 61/716,878 filed Oct. 22, 2012, incorporated by reference herein in its entirety which sequence of the analog comprises one or more amino acid modifications which affect GIP activity, glucagon activity, and/or GLP-1 activity, enhance stability, e.g., by reducing degradation of the peptide (e.g., by improving resistance to DPP-IV proteases), enhance solubility, increase half-life, delay the onset of action, extend the duration of action at the GIP, glucagon, or GLP-1 receptor, or a combination of any of the foregoing. Such amino acid modifications, in addition to other modifications, are further described herein with regard to glucagon analogs, and any of these modifications can be applied individually or in combination.

[1451] Also provided herein are dimers and multimers comprising two or more GIP agonist peptides of the present disclosures (e.g. Class 2 and/or Class 6 glucagon related peptides). Conjugates comprising a GIP agonist peptide of the present disclosures and a conjugate moiety are additionally provided herein. In some aspects, the conjugate is a fusion polypeptide comprising the GIP agonist peptide of the present disclosures fused to a heterologous peptide. The present disclosures also provides kits comprising the GIP agonist peptides, dimers, multimers, or conjugates of the present disclosures (or a combination thereof).

[1452] Pharmaceutical compositions comprising any of the GIP agonist peptides, dimers, multimers, or conjugates of the present disclosures (e.g. Class 2 and/or Class 6 glucagon related peptides) or a combination thereof, and a pharmaceutically acceptable carrier, diluent, or excipient are further provided by the present disclosures. The pharmaceutical compositions are preferably sterile and suitable for parenteral administration. The pharmaceutical compositions are contemplated for use in methods of treating or preventing diabetes or obesity, or medical conditions associated with diabetes or obesity. Accordingly, in exemplary embodiments the present disclosure provides a method of reducing weight gain or inducing weight loss, and/or a method of treating or preventing diabetes or obesity, by administering the GIP agonist peptides (e.g. Class 2 and/or Class 6 glucagon related peptides), optionally in combination with any other anti-diabetes or anti-obesity agents including such agents described herein.

[1453] Anti-diabetic agents known in the art or under investigation include insulin, leptin, Peptide YY (PYY), Pancreatic Peptide (PP), fibroblast growth factor 21 (FGF21), Y2Y4 receptor agonists, sulfonylureas, such as tolbutamide (Orinase), acetohexamide (Dymelor), tolazamide (Tolinase), chlorpropamide (Diabinese), glipizide (Glucotrol), glyburide (Diabeta, Micronase, Glynase), glimepiride (Amaryl), or gliclazide (Diamicron); meglitinides, such as repaglinide (Prandin) or nateglinide (Starlix); biguanides such as metformin (Glucophage) or phenformin; thiazolidinediones such as rosiglitazone (Avandia), pioglitazone (Actos), or troglitazone (Rezulin), or other PPARγ inhibitors; alpha glucosidase inhibitors that inhibit carbohydrate digestion, such as miglitol (Glyset), acarbose (Precose/Glucobay); exenatide (Byetta) or pramlintide; Dipeptidyl peptidase-4 (DPP-4) inhibitors such as vildagliptin or sitagliptin; SGLT (sodium-dependent glucose transporter 1) inhibitors; glucokinase activators (GKA); glucagon receptor antagonists (GRA); or FBPase (fructose 1,6-bisphosphatase) inhibitors.

[1454] Anti-obesity agents known in the art or under investigation include appetite suppressants, including phenethylamine type stimulants, phentermine (optionally with fenfluramine or dexfenfluramine), diethylpropion (Tenuate®), phendimetrazine (Prelu-2®, Bontril®), benzphetamine (Didrex®), sibutramine (Meridia®, Reductil®); rimonabant (Acomplia®), other cannabinoid receptor antagonists; oxyntomodulin; fluoxetine hydrochloride (Prozac); Qnexa (topiramate and phentermine), Excalia (bupropion and zonisamide) or Contrave (bupropion and naltrexone); or lipase inhibitors, similar to XENICAL (Orlistat) or Cetilistat (also known as ATL-962), or GT 389-255.

[1455] The peptides described herein in some embodiments are co-administered with an agent for treatment of non-alcoholic fatty liver disease or NASH. Agents used to treat non-alcoholic fatty liver disease include ursodeoxycholic acid (a.k.a., Actigall, URSO, and Ursodiol), Metformin (Glucophage), rosiglitazone (Avandia), Clofibrate, Gemfibrozil, Polymixin B, and Betaine.

### Effect of Dipeptide Prodrug Element Structure on Cleavage Rate

[1456] As previously described herein, the rate of cleavage of the dipeptide prodrug element A-B from the glucagon superfamily peptide, and thus activation of the prodrug, depends on the structure (including N-alkylation, number of substituents, length or bulkiness), and stereochemistry of the amino acids of the dipeptide prodrug element. The rate of cleavage of the dipeptide prodrug element A-B from the glucagon superfamily peptide also depends on the steric hindrance, nucleophilicity, stability of the leaving group of Q during diketopiperazine formation. Some of these structural features are described in Category I, Category II, and Category III below, which form part of the invention.

[1457] Category I: Composition of Amino Acid B of the Dipeptide Prodrug Element

[1458] In some embodiments, the half-life of the prodrug, e.g., the chemical cleavage half-life (t_{1/2}) of A-B from Q of at least about 1 hour to about 1 week in PBS, under physiological conditions, is dependent on the presence and length of the N-alkyl substituent on the B amino acid. For example, a prodrug that has a shorter N-alkyl substituent on the B amino acid (e.g. Gly(N-methyl)), will undergo a slower rate of cleavage of A-B, and have a longer half-life, than a prodrug that has a longer N-alkyl substituent on the B amino acid (e.g., Gly(N-hexyl)).

[1459] In some embodiments, the half-life of the prodrug is dependent on the degree of substitution at the beta position of the B amino acid of the dipeptide prodrug element. For example, a prodrug that has a B amino acid that is disubstituted at the beta position (e.g., N-alkylated isoleucine) will undergo slower cleavage of A-B, and have a longer half-life, than a prodrug that has a B amino acid that is monosubstituted at the beta position (e.g., N-alkylated leucine). Further, a prodrug that has a B amino acid that is monosubstituted at the beta position (e.g., N-alkylated leucine) will undergo slower cleavage of A-B, and have a longer half-life, than a prodrug that has a B amino acid that is unsubstituted at the beta position (e.g., N-alkylated alanine). Further still, a prodrug that has a B amino acid that has carbon at the beta position (e.g., N-alkylated alanine) will undergo slower cleavage of A-B, and have a longer half-life, than a prodrug that has glycine as the B amino acid.

[1460] In some embodiments, the half-life of the prodrug is dependent on the bulkiness of the side chain of the B amino acid. For example, a prodrug that has a bulkier side chain on the B amino acid (e.g., N-alkylated phenylalanine), will undergo slower cleavage of A-B, and have a longer half-life, than a prodrug that has a less bulky side chain on the B amino acid (e.g., N-alkylated alanine).

[1461] The composition of the B amino acid of the dipeptide prodrug element can be classified into the below sub-categories IA, IB, and IC. Generally, the dipeptide prodrug elements in sub-category IA undergo cleavage the fastest and the dipeptide prodrug elements in sub-category IC undergo cleavage the slowest.

[1462] Sub-Category IA: Amino Acid B of the Dipeptide Prodrug Element is N-Alkylated Glycine

[1463] In some embodiments, the prodrug comprises the structure:

A-B-Q;

[1464] wherein Q is a glucagon superfamily peptide;

[1465] wherein A-B comprises the structure:

[chemical structure]

[1466] wherein

[1467] R₁ and R₂ are independently selected from the group consisting of H, C₁-C₁₈ alkyl, C₂-C₁₈ alkenyl, (C₁-C₁₈ alkyl)OH, (C₁-C₁₈ alkyl)SH, (C₂-C₃ alkyl)SCH₃, (C₁-C₄ alkyl)CONH₂, (C₁-C₄ alkyl)COOH, (C₁-C₄ alkyl)NH₂, (C₁-C₄ alkyl)NHC(NH₂⁺)NH₂, (C₀-C₄ alkyl)(C₃-C₆ cycloalkyl), (C₀-C₄ alkyl)(C₂-C₅ heterocyclic), (C₀-C₄ alkyl)(C₆-C₁₀ aryl)R₇, (C₁-C₄ alkyl)(C₃-C₉ heteroaryl), and C₁-C₁₂ alkyl(W₁)C₁-C₁₂ alkyl, wherein W₁ is a heteroatom selected from the group consisting of N, S and O, or R₁ and R₂ together with the atoms to which they are attached form a C₃-C₁₂ cycloalkyl;

[1468] R₃ is C₁-C₁₈ alkyl;

[1469] R₄ and R₈ are each H;

[1470] R₅ is NHR₆;

[1471] R₆ is H or C₁-C₄ alkyl, or R₅ and R₂ together with the atoms to which they are attached form a 4, 5 or 6 member heterocyclic ring; and,

[1472] R₇ is selected from the group consisting of H, OH, halo, (C₁-C₇ alkyl), (C₂-C₇ alkenyl), OCF₃, NO₂, CN, NC, O(C₁-C₇ alkyl), CO₂H, CO₂(C₁-C₇ alkyl), NHR₆, aryl, and heteroaryl.

[1473] In some embodiments, the B amino acid is selected from the group consisting of glycine(N-methyl), glycine(N-ethyl), glycine(N-propyl), glycine(N-butyl), glycine(N-pentyl), glycine(N-hexyl), glycine(N-heptyl), and glycine(N-octyl). For example, the B amino acid can be glycine(N-methyl) or glycine(N-hexyl).

[1474] In some embodiments when R₁ and R₂ are both hydrogen, R₃ is C₁-C₄ alkyl, for example, when A-B is conjugated to an aliphatic amine. In some embodiments when R₁ and R₂ are both hydrogen, R₃ is C₅-C₈ alkyl, for example, when A-B is conjugated to an aliphatic amine. In some embodiments when at least one of R₁ or R₂ is not hydrogen, R₃ is C₁-C₄ alkyl, for example, when A-B is conjugated to an aliphatic amine. In some embodiments when at least one of R₁ or R₂ is not hydrogen, R₃ is C₅-C₈ alkyl, for example, when A-B is conjugated to an aliphatic amine.

[1475] In some embodiments when R₁ and R₂ are both hydrogen and R₃ is methyl, A-B is not conjugated to the alpha amino group of F⁷GLP-1(8-37).

[1476] Sub-Category IB: Amino Acid B of the Dipeptide Prodrug Element is Unsubstituted or Monosubstituted at the Beta Position

[1477] In some embodiments, the prodrug comprises the structure:

A-B-Q;

[1478] wherein Q is a glucagon superfamily peptide;

[1479] wherein A-B comprises the structure:

[chemical structure]

[1480] wherein

[1481] R₁ and R₂ are independently selected from the group consisting of H, C₁-C₁₈ alkyl, C₂-C₁₈ alkenyl, (C₁-C₁₈ alkyl)OH, (C₁-C₁₈ alkyl)SH, (C₂-C₃ alkyl)SCH₃, (C₁-C₄ alkyl)CONH₂, (C₁-C₄ alkyl)COOH, (C₁-C₄ alkyl)NH₂, (C₁-C₄ alkyl)NHC(NH₂⁺)NH₂, (C₀-C₄ alkyl)(C₃-C₆ cycloalkyl), (C₀-C₄ alkyl)(C₂-C₅ heterocyclic), (C₀-C₄ alkyl)(C₆-C₁₀ aryl)R₇, (C₁-C₄ alkyl)(C₃-C₉ heteroaryl), and C₁-C₁₂ alkyl(W₁)C₁-C₁₂ alkyl, wherein W₁ is a heteroatom selected from the group consisting of N, S and O, or R₁ and R₂ together with the atoms to which they are attached form a C₃-C₁₂ cycloalkyl;

[1482] R₃ is C₁-C₁₈ alkyl;

[1483] R₄ is selected from the group consisting of CH₃, CH₂(C₁-C₁₀ alkyl), CH₂(C₂-C₁₀ alkenyl), CH₂(C₀-C₁₀ alkyl)OH, CH₂(C₀-C₁₀ alkyl)SH, CH₂(C₀-C₃ alkyl)SCH₃, CH₂(C₀-C₃ alkyl)CONH₂, CH₂(C₀-C₃ alkyl)COOH, CH₂(C₀-C₃ alkyl)NH₂, CH₂(C₀-C₃ alkyl)NHC(NH₂⁺)NH₂, CH₂(C₀-C₃ alkyl)(C₃-C₆ cycloalkyl), CH₂(C₀-C₃ alkyl)(C₂-C₅ heterocyclic), CH₂(C₀-C₃ alkyl)(C₆-C₁₀ aryl)R₇, CH₂ (C₁-C₃ alkyl)(C₃-C₉ heteroaryl), and CH₂ (C₀-C₁₂ alkyl)(W₁)C₁-C₁₂ alkyl, wherein W₁ is a heteroatom selected from the group consisting of N, S and O; or R₄ and R₃ together with the atoms to which they are attached form a 4, 5 or 6 member heterocyclic ring;

[1484] R₈ is H,

[1485] R₅ is NHR₆, or R₅ and R₂ together with the atoms to which they are attached form a 4, 5 or 6 member heterocyclic ring;

[1486] R₆ is H or C₁-C₄ alkyl; and,

[1487] R₇ is selected from the group consisting of H, OH, halo, (C₁-C₇ alkyl), (C₂-C₇ alkenyl), OCF₃, NO₂, CN, NC, O(C₁-C₇ alkyl), CO₂H, CO₂(C₁-C₇ alkyl), NHR₆, aryl, and heteroaryl.

[1488] In some embodiments, R₄ is selected from the group consisting of CH₃, CH₂(C₁-C₄ alkyl), CH₂(C₁-C₄) alkenyl, CH₂(C₀-C₄ alkyl)OH, CH₂(C₀-C₄ alkyl)SH, CH₂(C₀-C₃ alkyl)SCH₃, CH₂(C₀-C₃ alkyl)CONH₂, CH₂(C₀-C₃ alkyl)COOH, CH₂(C₀-C₄ alkyl)NH₂, and CH₂(C₀-C₃ alkyl)NHC(NH₂⁺)NH₂.

[1489] Nonlimiting examples of the B amino acid in these embodiments include alanine(N—C₁-C₁₀alkyl), leucine(N—C₁-C₁₀alkyl), methionine(N—C₁-C₁₀alkyl), asparagine(N—C₁-C₁₀alkyl), glutamic acid(N—C₁-C₁₀alkyl), aspartic acid(N—C₁-C₁₀alkyl), glutamine(N—C₁-C₁₀alkyl), histidine(N—C₁-C₁₀alkyl), lysine(N—C₁-C₁₀alkyl), arginine(N—C₁-C₁₀alkyl), serine(N—C₁-C₁₀alkyl), and cysteine(N—C₁-C₁₀alkyl).

[1490] In some embodiments, the B amino acid is selected from the group consisting of alanine(N—C₁-C₆alkyl), leucine(N—C₁-C₆alkyl), methionine(N—C₁-C₆alkyl), asparagine(N—C₁-C₆alkyl), glutamic acid(N—C₁-C₆alkyl), aspartic acid(N—C₁-C₆alkyl), glutamine(N—C₁-C₆alkyl), histidine(N—C₁-C₆alkyl), lysine(N—C₁-C₆alkyl), arginine(N—C₁-C₆alkyl), serine(N—C₁-C₆alkyl), and cysteine(N—C₁-C₆alkyl).

[1491] For example, the B amino acid can include alanine(N-methyl), leucine(N-methyl), methionine(N-methyl), asparagine(N-methyl), glutamic acid(N-methyl), aspartic acid(N-methyl), glutamine(N-methyl), histidine(N-methyl), lysine(N-methyl), arginine(N-methyl), serine(N-methyl), and cysteine(N-methyl).

[1492] In some embodiments, R₄ is selected from the group consisting of CH₂(C₀-C₃ alkyl)(C₃-C₆ cycloalkyl), CH₂(C₀-C₃ alkyl)(C₂-C₅ heterocyclic), CH₂(C₀-C₃ alkyl)(C₆-C₁₀ aryl)R₇, CH₂ (C₁-C₃ alkyl)(C₃-C₉ heteroaryl), and CH₂(C₀-C₁₂ alkyl)(W₁)C₁-C₁₂ alkyl, wherein W₁ is a heteroatom selected from the group consisting of N, S and O, and wherein R₇ is selected from the group consisting of H and OH.

[1493] Nonlimiting examples of the B amino acid in these embodiments include phenylalanine(N—C₁-C₁₀alkyl), tyrosine(N—C₁-C₁₀alkyl), and tryptophan(N—C₁-C₁₀alkyl). In some embodiments, the B amino acid is selected from the group consisting of phenylalanine(N—C₁-C₆alkyl), tyrosine(N—C₁-C₆alkyl), and tryptophan(N—C₁-C₆alkyl). For example, the B amino acid can include phenylalanine(N-methyl), tyrosine(N-methyl), and tryptophan(N-methyl).

[1494] In some embodiments, the B amino acid is proline. In some embodiments, proline is excluded from Sub-Category IB.

[1495] Sub-Category IC: Amino Acid B of the Dipeptide Prodrug Element Disubstituted at the Beta Position

[1496] In some embodiments, the prodrug comprises the structure:

A-B-Q;

[1497] wherein Q is a glucagon superfamily peptide;

[1498] wherein A-B comprises the structure:

[chemical structure]

[1499] wherein

[1500] R₁ and R₂ are independently selected from the group consisting of H, C₁-C₁₈ alkyl, C₂-C₁₈ alkenyl, (C₁-C₁₈ alkyl)OH, (C₁-C₁₈ alkyl)SH, (C₂-C₃ alkyl)SCH₃, (C₁-C₄ alkyl)CONH₂, (C₁-C₄ alkyl)COOH, (C₁-C₄ alkyl)NH₂, (C₁-C₄ alkyl)NHC(NH₂⁺)NH₂, (C₀-C₄ alkyl)(C₃-C₆ cycloalkyl), (C₀-C₄ alkyl)(C₂-C₅ heterocyclic), (C₀-C₄ alkyl)(C₆-C₁₀ aryl)R₇, (C₁-C₄ alkyl)(C₃-C₉ heteroaryl), and C₁-C₁₂ alkyl(W₁)C₁-C₁₂ alkyl, wherein W₁ is a heteroatom selected from the group consisting of N, S and O, or R₁ and R₂ together with the atoms to which they are attached form a C₃-C₁₂ cycloalkyl; or R₁ and R₂ together with the atoms to which they are attached form a C₃-C₁₂ cycloalkyl;

[1501] R₃ is C₁-C₁₈ alkyl;

[1502] R₄ is independently selected from the group consisting of CH(C₁-C₈ alkyl)₂, CH(C₂-C₈ alkenyl)₂, CH(C₁-C₈ alkyl)(OH), CH(C₁-C₈ alkyl)((C₁-C₈ alkyl)SH), CH(C₁-C₃ alkyl)((C₁-C₈ alkyl)(NH₂));

[1503] R₈ is H;

[1504] R₅ is NHR₆, or R₅ and R₂ together with the atoms to which they are attached form a 4, 5 or 6 member heterocyclic ring;

[1505] R₆ is H or C₁-C₄ alkyl; and,

[1506] R₇ is selected from the group consisting of H, OH, halo, (C₁-C₇ alkyl), (C₂-C₇ alkenyl), OCF₃, NO₂, CN, NC, O(C₁-C₇ alkyl), CO₂H, CO₂(C₁-C₇ alkyl), NHR₆, aryl, and heteroaryl.

[1507] In some embodiments, R₄ is CH(C₁-C₈ alkyl)₂ or CH(C₁-C₈ alkyl)OH. Nonlimiting examples of the B amino acid include isoleucine(N—C₁-C₁₀alkyl), valine(N—C₁-C₁₀alkyl), and threonine(N—C₁-C₁₀alkyl). In some embodiments, the B amino acid is selected from the group consisting of isoleucine(N—C₁-C₆alkyl), valine(N—C₁-C₆alkyl), and threonine(N—C₁-C₆alkyl). For example, the B amino acid can include isoleucine(N-methyl), valine(N-methyl), and threonine(N-methyl).

[1508] Category II: Composition of Amino Acid a of the Dipeptide Prodrug Element

[1509] In some embodiments, the half-life of the prodrug is dependent on the number of substituents at the alpha position of the A amino acid. For example, a prodrug comprising an A amino acid that is an α-monosubstituted amino acid (e.g., Ala) will undergo cleavage more slowly, and have a longer half-life than, a prodrug comprising an A amino acid that is an α,α-disubstituted amino acid (e.g., Aib).

[1510] In some embodiments, the half-life of the prodrug is dependent on the degree of alkylation on the alpha amino group of the A amino acid. Generally, the greater the degree of alkylation, the slower the rate of cleavage and the longer the half-life of the prodrug. For example, a dipeptide prodrug element having N-alkylated Ala will cleave at a slower rate, and have a longer half-life, than Ala.

[1511] The composition of the A amino acid of the dipeptide prodrug element can be classified into the below sub-categories IIA and IIB. Generally, the dipeptide prodrug elements in sub-category IIA cleave faster than dipeptide prodrug elements in sub-category IIB.

[1512] Sub-Category IIA: Amino Acid a of the Dipeptide Prodrug Element is Disubstituted at the Alpha Position

[1513] In some embodiments, the A amino acid of the dipeptide prodrug element is disubstituted at the alpha position. In these embodiments, R₁ and R₂ of the structures described in sub-categories IA, IB, and IC are independently selected from the group consisting of C₁-C₁₀ alkyl, C₂-C₁₀ alkenyl, (C₁-C₁₀ alkyl)OH, (C₁-C₁₀ alkyl)SH, (C₂-C₃ alkyl)SCH₃, (C₁-C₄ alkyl)CONH₂, (C₁-C₄ alkyl)COOH, (C₁-C₄ alkyl)NH₂, (C₁-C₄ alkyl)NHC(NH₂⁺)NH₂, (C₀-C₄ alkyl)(C₃-C₆ cycloalkyl), (C₀-C₄ alkyl)(C₂-C₅ heterocyclic), (C₀-C₄ alkyl)(C₆-C₁₀ aryl)R₇, (C₁-C₄ alkyl)(C₃-C₉ heteroaryl), and C₁-C₁₂ alkyl(W₁)C₁-C₁₂ alkyl, wherein W₁ is a heteroatom selected from the group consisting of N, S and O, or R₁ and R₂ together with the atoms to which they are attached form a C₃-C₁₂ cycloalkyl, and wherein R₇ is selected from the group consisting of H and OH.

[1514] For example, the A amino acid can include aminoisobutyric acid (Aib).

[1515] Sub-Category IIB: Amino Acid a of the Dipeptide Prodrug Element is Unsubstituted or Monosubstituted at the Alpha Position

[1516] In some embodiments, the A amino acid of the dipeptide prodrug element is unsubstituted or monosubstituted at the alpha position. In these embodiments, R₁ of the structures described in sub-categories IA, IB, and IC is H, and R₂ of the structures described in sub-categories IA, IB, and IC is selected from the group consisting of H, C₁-C₁₀ alkyl, C₂-C₁₀ alkenyl, (C₁-C₁₀ alkyl)OH, (C₁-C₁₀ alkyl)SH, (C₂-C₃ alkyl)SCH₃, (C₁-C₄ alkyl)CONH₂, (C₁-C₄ alkyl)COOH, (C₁-C₄ alkyl)NH₂, (C₁-C₄ alkyl)NHC(NH₂⁺)NH₂, (C₀-C₄ alkyl)(C₃-C₆ cycloalkyl), (C₀-C₄ alkyl)(C₂-C₅ heterocyclic), (C₀-C₄ alkyl)(C₆-C₁₀ aryl)R₇, (C₁-C₄ alkyl)(C₃-C₉ heteroaryl), and C₁-C₁₂ alkyl(W₁)C₁-C₁₂ alkyl, wherein R₇ is selected from the group consisting of H and OH, wherein W₁ is a heteroatom selected from the group consisting of N, S and O, or R₁ and R₂ together with the atoms to which they are attached form a C₃-C₁₂ cycloalkyl, or R₂ and R₅ together with the atoms to which they are attached form a 4, 5 or 6 member heterocyclic ring.

[1517] In some embodiments, the A amino acid of the dipeptide prodrug element has ‘d’ stereochemistry. Nonlimiting examples of the A amino acid in these embodiments include lysine, cysteine, and alanine. For example, d-lysine, d-cysteine, and d-alanine. In some embodiments, d-stereochemistry may enhance half-life through reducing proteolytic degradation of the prodrug peptide.

[1518] In some embodiments, the A amino acid is N-alkylated with a group that has 1 to 4 carbon atoms such as Ala(N—C₁-C₄alkyl), Lys(N—C₁-C₄alkyl), and Cys(N—C₁-C₄alkyl). For example, the A amino acid can be Ala(N-methyl), Lys(N-methyl), and Cys(N-methyl). N-alkylation of the A amino acid decreases the rate of cleavage of the dipeptide prodrug element from Q and provides a longer half-life.

[1519] Category III: Conjugation Site of the Dipeptide Prodrug Element (A-B) to the Glucagon Superfamily Peptide (Q)

[1520] In some embodiments, the half-life of the prodrug depends on the steric hindrance, nucleophilicity, and stability of the leaving group on Q during diketopiperazine formation. The less sterically hindered the leaving group, the less nucleophilic the leaving group, or the more stable the leaving group after cleavage, the shorter the half life of the prodrug. The type of leaving group on Q can be determined by the type of the linkage between A-B and an amino group of Q, as described in sub-categories IIIA and IIIB below. Generally, dipeptide prodrug elements in sub-category IIIA cleave slower from Q and have a longer half-life than dipeptide prodrug elements in subcategory IIIB

[1521] Sub-Category IIIA: A-B Linked to an Aliphatic Amino Group of Q

[1522] In some embodiments, A-B is linked to Q through an amide bond between A-B and an aliphatic amino group of Q to result in a prodrug with a chemical cleavage half-life (t_{1/2}) of A-B from Q of at least about 1 hour to about 1 week in PBS, under physiological conditions, as previously described herein.

[1523] In some embodiments, A-B is linked to Q through an amide bond between A-B and the alpha amino group of the N-terminal amino acid of Q. For example, a dipeptide prodrug element having a B amino acid from any of sub-categories IA, IB, and IC and an A amino acid from any of sub-categories IIA and IIB can be linked to the N-terminal amino acid of Q to result in a prodrug with a chemical cleavage half-life (t_{1/2}) of A-B from Q of at least about 1 hour to about 1 week in PBS, under physiological conditions.

[1524] In some embodiments, A-B is linked to Q through an amide bond between A-B and an aliphatic amino group on a side chain of an amino acid of Q. For example, a dipeptide prodrug element having a B amino acid from any of sub-categories IA, IB, and IC and an A amino acid from any of sub-categories IIA and IIB can be linked to an aliphatic amino group of a side chain of an amino acid of Q to result in a prodrug with a chemical cleavage half-life (t_{1/2}) of A-B from Q of at least about 1 hour to about 1 week in PBS, under physiological conditions.

[1525] In some embodiments, when A-B is linked to Q through an amide bond between A-B and an aliphatic amino group of Q, either A should be an α,α-disubstituted amino acid (Sub-category IIA) or B should be N-alkylated (any of Sub-categories IA, IB or IC), or both. For example, when A is an α-monosubstituted amino acid (e.g., Ala), B is not N-alkylated, and A-B is attached to Q through an aliphatic amino group of Q, then there will not be significant cleavage of A-B.

[1526] In other embodiments, when A-B is linked to the alpha amino group of F⁷GLP-1(8-37), A-B is not Gly-Gly(N-Me).

[1527] In other optional embodiments, when A-B is linked to Q through an amide bond between A-B and an aliphatic amino group of Q, and A is an amino acid that is unsubstituted at the alpha position (e.g. glycine) and B is an amino acid from Sub-category IA (N-alkylated glycine), the N-alkyl substitutent of the B amino acid has a length of at least five carbon atoms (for example, N—C₅-C₈alkyl).

[1528] In yet other embodiments, when A-B is linked to Q through an amide bond between A-B and an aliphatic amino group of Q, and the A amino acid is unsubstituted or monosubstituted at the alpha position (Sub-category IIB), the B amino acid is not proline. In some embodiments, when A-B is linked to Q through an amide bond between A-B and an aliphatic amino group of Q, A-B is not Gly-Pro. In some embodiments, when the B amino acid is proline, the A amino acid is from Subcategory IIA.

[1529] Sub-Category IIIB: A-B Linked to an Aromatic Amino Group of Q

[1530] In some embodiments, A-B is linked to Q through an amide bond between A-B and an aromatic amino group of a side chain of an amino acid of Q to result in a prodrug with a chemical cleavage half-life (t_{1/2}) of A-B from Q of at least about 1 hour to about 1 week in PBS, under physiological conditions, as previously described herein. For example, a dipeptide prodrug element having a B amino acid from any of sub-categories IA, IB, and IC and an A amino acid from any of sub-categories IIA and IIB can be linked to an aromatic amino group of a side chain of an amino acid of Q to result in a prodrug with a chemical cleavage half-life (t_{1/2}) of A-B from Q of at least about 1 hour to about 1 week in PBS, under physiological conditions.

[1531] Any of the B amino acids defined by Category I can be combined with any of the A amino acids defined by Category II to form a dipeptide prodrug element. This dipeptide prodrug element can be linked to any of the positions described in Category III. The half life of the prodrug can be tuned through the selection of:

[1532] (i) the number of substituents on the alpha position of the A amino acid;

[1533] (ii) the degree of N-alkylation of the A and the B amino acids;

[1534] (iii) the number of substituents on the beta position of the B amino acid;

[1535] (iv) the bulkiness of the side chain of the B amino acid; and,

[1536] (iii) the steric hindrance, nucleophilicity, and stability of the leaving group on Q during diketopiperazine formation.

[1537] Modification of Dipeptide Prodrug Element A-B

[1538] The dipeptide prodrug elements described above can be further modified to comprise a hydrophilic moiety, an acyl group, or an alkyl group, as previously described herein. In some embodiments, the dipeptide prodrug element includes lysine that is conjugated to an acyl group or an alkyl group through its side chain amino group. In some embodiments, the dipeptide prodrug element includes cysteine that is conjugated to a hydrophilic moiety (e.g., 40 kD PEG) through the side chain sulfhydryl group. The hydrophilic moiety, acyl group, or alkyl group can be conjugated directly to the dipeptide prodrug element or through a spacer. In some exemplary embodiments, the hydrophilic group, the alkyl group and/or the acyl group are conjugated to the A amino acid of the dipeptide prodrug element.

[1539] In some embodiments, the following dipeptide prodrug elements are PEGylated: dCys-Gly(N-Hexyl) dCys-Gly(N-Methyl), and dCys-Phe(N-Methyl). In some embodiments, the following dipeptide prodrug elements include an acyl group: dLys-Gly(N-Hexyl), dLys-Gly(N-Methyl), and dLys-Phe(N-Methyl). In some embodiments, the following dipeptide prodrug elements include an alkyl group: dLys-Gly(N-Hexyl), dLys-Gly(N-Methyl), and dLys-Phe(N-Methyl).

### Exemplary Embodiments

[1540] The dipeptide prodrug element of the invention can include combinations of any of the B amino acids from Category I with any of the A amino acids from Category II. Nonlimiting examples of amino acids suitable for the A amino acid and for the B amino acid of the dipeptide prodrug element are listed in the below Table.

TABLE 4

| Amino Acid # | Amino Acid ‘A’ | Amino Acid ‘B’ |
|---|---|---|
| 1 | Aib | Gly(N-C1-C8alkyl) |
| 2 | Gly | Ala(N-C1-C8alkyl) |
| 3 | Ala | Leu(N-C1-C8alkyl) |
| 4 | Leu | Met(N-C1-C8alkyl) |
| 5 | Met | Asn(N-C1-C8alkyl) |
| 6 | Asn | Glu(N-C1-C8alkyl) |
| 7 | Glu | Asp(N-C1-C8alkyl) |
| 8 | Asp | Gln(N-C1-C8alkyl) |
| 9 | Gln | His(N-C1-C8alkyl) |
| 10 | His | Lys(N-C1-C8alkyl) |
| 11 | Lys | Arg(N-C1-C8alkyl) |
| 12 | Arg | Ser(N-C1-C8alkyl) |
| 13 | Ser | Cys(N-C1-C8alkyl) |
| 14 | Cys | Pro |
| 15 | Pro | Phe(N-C1-C8alkyl) |
| 16 | Phe | Tyr(N-C1-C8alkyl) |
| 17 | Tyr | Trp(N-C1-C8alkyl) |
| 18 | Trp | Ile(N-C1-C8alkyl) |
| 19 | Ile | Val(N-C1-C8alkyl) |
| 20 | Val | Thr(N-C1-C8alkyl) |
| 21 | Thr | d-Ala(N-C1-C8alkyl) |
| 22 | d-Ala | d-Leu(N-C1-C8alkyl) |
| 23 | d-Leu | d-Met(N-C1-C8alkyl) |
| 24 | d-Met | d-Asn(N-C1-C8alkyl) |
| 25 | d-Asn | d-Glu(N-C1-C8alkyl) |
| 26 | d-Glu | d-Asp(N-C1-C8alkyl) |
| 27 | d-Asp | d-Gln(N-C1-C8alkyl) |
| 28 | d-Gln | d-His(N-C1-C8alkyl) |
| 29 | d-His | d-Lys(N-C1-C8alkyl) |
| 30 | d-Lys | d-Arg(N-C1-C8alkyl) |
| 31 | d-Arg | d-Ser(N-C1-C8alkyl) |
| 32 | d-Ser | d-Cys(N-C1-C8alkyl) |
| 33 | d-Cys | d-Pro |
| 34 | d-Pro | d-Phe(N-C1-C8alkyl) |
| 35 | d-Phe | d-Tyr(N-C1-C8alkyl) |
| 36 | d-Tyr | d-Trp(N-C1-C8alkyl) |
| 37 | d-Trp | d-Ile(N-C1-C8alkyl) |
| 38 | d-Ile | d-Val(N-C1-C8alkyl) |
| 39 | d-Val | d-Thr(N-C1-C8alkyl) |
| 40 | d-Thr | Gly(N-methyl) |
| 41 | Gly(N-methyl) | Ala(N-methyl) |
| 42 | Ala(N-methyl) | Leu(N-methyl) |
| 43 | Leu(N-methyl) | Met(N-methyl) |
| 44 | Met(N-methyl) | Asn(N-methyl) |
| 45 | Asn(N-methyl) | Glu(N-methyl) |
| 46 | Glu(N-methyl) | Asp(N-methyl) |
| 47 | Asp(N-methyl) | Gln(N-methyl) |
| 48 | Gln(N-methyl) | His(N-methyl) |
| 49 | His(N-methyl) | Lys(N-methyl) |
| 50 | Lys(N-methyl) | Arg(N-methyl) |
| 51 | Arg(N-methyl) | Ser(N-methyl) |
| 52 | Ser(N-methyl) | Cys(N-methyl) |
| 53 | Cys(N-methyl) | Phe(N-methyl) |
| 54 | Phe(N-methyl) | Tyr(N-methyl) |
| 55 | Tyr(N-methyl) | Trp(N-methyl) |
| 56 | Trp(N-methyl) | Ile(N-methyl) |
| 57 | Ile(N-methyl) | Val(N-methyl) |
| 58 | Val(N-methyl) | Thr(N-methyl) |
| 59 | Thr(N-methyl) | d-Ala(N-methyl) |
| 60 | d-Ala(N-methyl) | d-Leu(N-methyl) |
| 61 | d-Leu(N-methyl) | d-Met(N-methyl) |
| 62 | d-Met(N-methyl) | d-Asn(N-methyl) |
| 63 | d-Asn(N-methyl) | d-Glu(N-methyl) |
| 64 | d-Glu(N-methyl) | d-Asp(N-methyl) |
| 65 | d-Asp(N-methyl) | d-Gln(N-methyl) |
| 66 | d-Gln(N-methyl) | d-His(N-methyl) |
| 67 | d-His(N-methyl) | d-Lys(N-methyl) |
| 68 | d-Lys(N-methyl) | d-Arg(N-methyl) |
| 69 | d-Arg(N-methyl) | d-Ser(N-methyl) |
| 70 | d-Ser(N-methyl) | d-Cys(N-methyl) |
| 71 | d-Cys(N-methyl) | d-Phe(N-methyl) |
| 72 | d-Phe(N-methyl) | d-Tyr(N-methyl) |
| 73 | d-Tyr(N-methyl) | d-Trp(N-methyl) |
| 74 | d-Trp(N-methyl) | d-Ile(N-methyl) |
| 75 | d-Ile(N-methyl) | d-Val(N-methyl) |
| 76 | d-Val(N-methyl) | d-Thr(N-methyl) |
| 77 | d-Thr(N-methyl) | Gly(N-hexyl) |
| 78 | | Ala(N-hexyl) |
| 79 | | Leu(N-hexyl) |
| 80 | | Met(N-hexyl) |
| 81 | | Asn(N-hexyl) |
| 82 | | Glu(N-hexyl) |
| 83 | | Asp(N-hexyl) |
| 84 | | Gln(N-hexyl) |
| 85 | | His(N-hexyl) |
| 86 | | Lys(N-hexyl) |
| 87 | | Arg(N-hexyl) |
| 88 | | Ser(N-hexyl) |
| 89 | | Cys(N-hexyl) |
| 90 | | Phe(N-hexyl) |
| 91 | | Tyr(N-hexyl) |
| 92 | | Trp(N-hexyl) |
| 93 | | Ile(N-hexyl) |
| 94 | | Val(N-hexyl) |
| 95 | | Thr(N-hexyl) |
| 96 | | d-Ala(N-hexyl) |
| 97 | | d-Leu(N-hexyl) |
| 98 | | d-Met(N-hexyl) |
| 99 | | d-Asn(N-hexyl) |
| 100 | | d-Glu(N-hexyl) |
| 101 | | d-Asp(N-hexyl) |
| 102 | | d-Gln(N-hexyl) |
| 103 | | d-His(N-hexyl) |
| 104 | | d-Lys(N-hexyl) |
| 105 | | d-Arg(N-hexyl) |
| 106 | | d-Ser(N-hexyl) |
| 107 | | d-Cys(N-hexyl) |
| 108 | | d-Phe(N-hexyl) |
| 109 | | d-Tyr(N-hexyl) |
| 110 | | d-Trp(N-hexyl) |
| 111 | | d-Ile(N-hexyl) |
| 112 | | d-Val(N-hexyl) |
| 113 | | d-Thr(N-hexyl) |

[1541] In some embodiments, the dipeptide prodrug element includes the combination of any one of A1-A77 with any one of B1-B113. For example, combinations of the A amino acid and the B amino acid of the dipeptide prodrug element can include: A1-B1; A1-B2; A1-B3; A1-B4; A1-B5; A1-B6; A1-B7; A1-B8; A1-B9; A1-B10; A1-B11; A1-B12; A1-B13; A1-B14; A1-B15; A1-B16; A1-B17; A1-B18; A1-B19; A1-B20; A1-B21; A1-B22; A1-B23; A1-B24; A1-B25; A1-B26; A1-B27; A1-B28; A1-B29; A1-B30; A1-B31; A1-B32; A1-B33; A1-B34; A1-B35; A1-B36; A1-B37; A1-B38; A1-B39; A1-B40; A1-B41; A1-B42; A1-B43; A1-B44; A1-B45; A1-B46; A1-B47; A1-B48; A1-B49; A1-B50; A1-B51; A1-B52; A1-B53; A1-B54; A1-B55; A1-B56; A1-B57; A1-B58; A1-B59; A1-B60; A1-B61; A1-B62; A1-B63; A1-B64; A1-B65; A1-B66; A1-B67; A1-B68; A1-B69; A1-B70; A1-B71; A1-B72; A1-B73; A1-B74; A1-B75; A1-B76; A1-B77; A1-B78; A1-B79; A1-B80; A1-B81; A1-B82; A1-B83; A1-B84; A1-B85; A1-B86; A1-B87; A1-B88; A1-B89; A1-B90; A1-B91; A1-B92; A1-B93; A1-B94; A1-B95; A1-B96; A1-B97; A1-B98; A1-B99; A1-B100; A1-B101; A1-B102; A1-B103; A1-B104; A1-B105; A1-B106; A1-B107; A1-B108; A1-B109;

[1542] A1-B110; A1-B111; A1-B112; A1-B113; A2-B1; A2-B2; A2-B3; A2-B4; A2-B5; A2-B6; A2-B7; A2-B8; A2-B9; A2-B10; A2-B11; A2-B12; A2-B13; A2-B14; A2-B15; A2-B16; A2-B17; A2-B18; A2-B19; A2-B20; A2-B21; A2-B22; A2-B23; A2-B24; A2-B25; A2-B26; A2-B27; A2-B28; A2-B29; A2-B30; A2-B31; A2-B32; A2-B33; A2-B34; A2-B35; A2-B36; A2-B37; A2-B38; A2-B39; A2-B40; A2-B41; A2-B42; A2-B43; A2-B44; A2-B45; A2-B46; A2-B47; A2-B48; A2-B49; A2-B50; A2-B51; A2-B52; A2-B53; A2-B54; A2-B55; A2-B56; A2-B57; A2-B58; A2-B59; A2-B60; A2-B61; A2-B62; A2-B63; A2-B64; A2-B65; A2-B66; A2-B67; A2-B68; A2-B69; A2-B70; A2-B71; A2-B72; A2-B73; A2-B74; A2-B75; A2-B76; A2-B77; A2-B78; A2-B79; A2-B80; A2-B81; A2-B82; A2-B83; A2-B84; A2-B85; A2-B86; A2-B87; A2-B88; A2-B89; A2-B90; A2-B91; A2-B92; A2-B93; A2-B94; A2-B95; A2-B96; A2-B97; A2-B98; A2-B99; A2-B100; A2-B101; A2-B102; A2-B103; A2-B104; A2-B105; A2-B106; A2-B107; A2-B108; A2-B109; A2-B110; A2-B111; A2-B112; A2-B113;

[1543] A3-B1; A3-B2; A3-B3; A3-B4; A3-B5; A3-B6; A3-B7; A3-B8; A3-B9; A3-B10; A3-B11; A3-B12; A3-B13; A3-B14; A3-B15; A3-B16; A3-B17; A3-B18; A3-B19; A3-B20; A3-B21; A3-B22; A3-B23; A3-B24; A3-B25; A3-B26; A3-B27; A3-B28; A3-B29; A3-B30; A3-B31; A3-B32; A3-B33; A3-B34; A3-B35; A3-B36; A3-B37; A3-B38; A3-B39; A3-B40; A3-B41; A3-B42; A3-B43; A3-B44; A3-B45; A3-B46; A3-B47; A3-B48; A3-B49; A3-B50; A3-B51; A3-B52; A3-B53; A3-B54; A3-B55; A3-B56; A3-B57; A3-B58; A3-B59; A3-B60; A3-B61; A3-B62; A3-B63; A3-B64; A3-B65; A3-B66; A3-B67; A3-B68; A3-B69; A3-B70; A3-B71; A3-B72; A3-B73; A3-B74; A3-B75; A3-B76; A3-B77; A3-B78; A3-B79; A3-B80; A3-B81; A3-B82; A3-B83; A3-B84; A3-B85; A3-B86; A3-B87; A3-B88; A3-B89; A3-B90; A3-B91; A3-B92; A3-B93; A3-B94; A3-B95; A3-B96; A3-B97; A3-B98; A3-B99; A3-B100; A3-B101; A3-B102; A3-B103; A3-B104; A3-B105; A3-B106; A3-B107; A3-B108; A3-B109; A3-B110; A3-B111; A3-B112; A3-B113;

[1544] A4-B1; A4-B2; A4-B3; A4-B4; A4-B5; A4-B6; A4-B7; A4-B8; A4-B9; A4-B10; A4-B11; A4-B12; A4-B13; A4-B14; A4-B15; A4-B16; A4-B17; A4-B18; A4-B19; A4-B20; A4-B21; A4-B22; A4-B23; A4-B24; A4-B25; A4-B26; A4-B27; A4-B28; A4-B29; A4-B30; A4-B31; A4-B32; A4-B33; A4-B34; A4-B35; A4-B36; A4-B37; A4-B38; A4-B39; A4-B40; A4-B41; A4-B42; A4-B43; A4-B44; A4-B45; A4-B46; A4-B47; A4-B48; A4-B49; A4-B50; A4-B51; A4-B52; A4-B53; A4-B54; A4-B55; A4-B56; A4-B57; A4-B58; A4-B59; A4-B60; A4-B61; A4-B62; A4-B63; A4-B64; A4-B65; A4-B66; A4-B67; A4-B68; A4-B69; A4-B70; A4-B71; A4-B72; A4-B73; A4-B74; A4-B75; A4-B76; A4-B77; A4-B78; A4-B79; A4-B80; A4-B81; A4-B82; A4-B83; A4-B84; A4-B85; A4-B86; A4-B87; A4-B88; A4-B89; A4-B90; A4-B91; A4-B92; A4-B93; A4-B94; A4-B95; A4-B96; A4-B97; A4-B98; A4-B99; A4-B100; A4-B101; A4-B102; A4-B103; A4-B104; A4-B105; A4-B106; A4-B107; A4-B108; A4-B109; A4-B110; A4-B111; A4-B112; A4-B113;

[1545] A5-B1; A5-B2; A5-B3; A5-B4; A5-B5; A5-B6; A5-B7; A5-B8; A5-B9; A5-B10; A5-B11; A5-B12; A5-B13; A5-B14; A5-B15; A5-B16; A5-B17; A5-B18; A5-B19; A5-B20; A5-B21; A5-B22; A5-B23; A5-B24; A5-B25; A5-B26; A5-B27; A5-B28; A5-B29; A5-B30; A5-B31; A5-B32; A5-B33; A5-B34; A5-B35; A5-B36; A5-B37; A5-B38; A5-B39; A5-B40; A5-B41; A5-B42; A5-B43; A5-B44; A5-B45; A5-B46; A5-B47; A5-B48; A5-B49; A5-B50; A5-B51; A5-B52; A5-B53; A5-B54; A5-B55; A5-B56; A5-B57; A5-B58; A5-B59; A5-B60; A5-B61; A5-B62; A5-B63; A5-B64; A5-B65; A5-B66; A5-B67; A5-B68; A5-B69; A5-B70; A5-B71; A5-B72; A5-B73; A5-B74; A5-B75; A5-B76; A5-B77; A5-B78; A5-B79; A5-B80; A5-B81; A5-B82; A5-B83; A5-B84; A5-B85; A5-B86; A5-B87; A5-B88; A5-B89; A5-B90; A5-B91; A5-B92; A5-B93; A5-B94; A5-B95; A5-B96; A5-B97; A5-B98; A5-B99; A5-B100; A5-B101; A5-B102; A5-B103; A5-B104; A5-B105; A5-B106; A5-B107; A5-B108; A5-B109; A5-B110; A5-B111; A5-B112; A5-B113;

[1546] A6-B1; A6-B2; A6-B3; A6-B4; A6-B5; A6-B6; A6-B7; A6-B8; A6-B9; A6-B10; A6-B11; A6-B12; A6-B13; A6-B14; A6-B15; A6-B16; A6-B17; A6-B18; A6-B19; A6-B20; A6-B21; A6-B22; A6-B23; A6-B24; A6-B25; A6-B26; A6-B27; A6-B28; A6-B29; A6-B30; A6-B31; A6-B32; A6-B33; A6-B34; A6-B35; A6-B36; A6-B37; A6-B38; A6-B39; A6-B40; A6-B41; A6-B42; A6-B43; A6-B44; A6-B45; A6-B46; A6-B47; A6-B48; A6-B49; A6-B50; A6-B51; A6-B52; A6-B53; A6-B54; A6-B55; A6-B56; A6-B57; A6-B58; A6-B59; A6-B60; A6-B61; A6-B62; A6-B63; A6-B64; A6-B65; A6-B66; A6-B67; A6-B68; A6-B69; A6-B70; A6-B71; A6-B72; A6-B73; A6-B74; A6-B75; A6-B76; A6-B77; A6-B78; A6-B79; A6-B80; A6-B81; A6-B82; A6-B83; A6-B84; A6-B85; A6-B86; A6-B87; A6-B88; A6-B89; A6-B90; A6-B91; A6-B92; A6-B93; A6-B94; A6-B95; A6-B96; A6-B97; A6-B98; A6-B99; A6-B100; A6-B101; A6-B102; A6-B103; A6-B104; A6-B105; A6-B106; A6-B107; A6-B108; A6-B109; A6-B110; A6-B111; A6-B112; A6-B113;

[1547] A7-B1; A7-B2; A7-B3; A7-B4; A7-B5; A7-B6; A7-B7; A7-B8; A7-B9; A7-B10; A7-B11; A7-B12; A7-B13; A7-B14; A7-B15; A7-B16; A7-B17; A7-B18; A7-B19; A7-B20; A7-B21; A7-B22; A7-B23; A7-B24; A7-B25; A7-B26; A7-B27; A7-B28; A7-B29; A7-B30; A7-B31; A7-B32; A7-B33; A7-B34; A7-B35; A7-B36; A7-B37; A7-B38; A7-B39; A7-B40; A7-B41; A7-B42; A7-B43; A7-B44; A7-B45; A7-B46; A7-B47; A7-B48; A7-B49; A7-B50; A7-B51; A7-B52; A7-B53; A7-B54; A7-B55; A7-B56; A7-B57; A7-B58; A7-B59; A7-B60; A7-B61; A7-B62; A7-B63; A7-B64; A7-B65; A7-B66; A7-B67; A7-B68; A7-B69; A7-B70; A7-B71; A7-B72; A7-B73; A7-B74; A7-B75; A7-B76; A7-B77; A7-B78; A7-B79; A7-B80; A7-B81; A7-B82; A7-B83; A7-B84; A7-B85; A7-B86; A7-B87; A7-B88; A7-B89; A7-B90; A7-B91; A7-B92; A7-B93; A7-B94; A7-B95; A7-B96; A7-B97; A7-B98; A7-B99; A7-B100; A7-B101; A7-B102; A7-B103; A7-B104; A7-B105; A7-B106; A7-B107; A7-B108; A7-B109; A7-B110; A7-B111; A7-B112; A7-B113;

[1548] A8-B1; A8-B2; A8-B3; A8-B4; A8-B5; A8-B6; A8-B7; A8-B8; A8-B9; A8-B10; A8-B11; A8-B12; A8-B13; A8-B14; A8-B15; A8-B16; A8-B17; A8-B18; A8-B19; A8-B20; A8-B21; A8-B22; A8-B23; A8-B24; A8-B25; A8-B26; A8-B27; A8-B28; A8-B29; A8-B30; A8-B31; A8-B32; A8-B33; A8-B34; A8-B35; A8-B36; A8-B37; A8-B38; A8-B39; A8-B40; A8-B41; A8-B42; A8-B43; A8-B44; A8-B45; A8-B46; A8-B47; A8-B48; A8-B49; A8-B50; A8-B51; A8-B52; A8-B53; A8-B54; A8-B55; A8-B56; A8-B57; A8-B58; A8-B59; A8-B60; A8-B61; A8-B62; A8-B63; A8-B64; A8-B65; A8-B66; A8-B67; A8-B68; A8-B69; A8-B70; A8-B71; A8-B72; A8-B73; A8-B74; A8-B75; A8-B76; A8-B77; A8-B78; A8-B79; A8-B80; A8-B81; A8-B82; A8-B83; A8-B84; A8-B85; A8-B86; A8-B87; A8-B88; A8-B89; A8-B90; A8-B91; A8-B92; A8-B93; A8-B94; A8-B95; A8-B96; A8-B97; A8-B98; A8-B99; A8-B100; A8-B101; A8-B102; A8-B103; A8-B104; A8-B105; A8-B106; A8-B107; A8-B108; A8-B109; A8-B110; A8-B111; A8-B112; A8-B113;

[1549] A9-B1; A9-B2; A9-B3; A9-B4; A9-B5; A9-B6; A9-B7; A9-B8; A9-B9; A9-B10; A9-B11; A9-B12; A9-B13; A9-B14; A9-B15; A9-B16; A9-B17; A9-B18; A9-B19; A9-B20; A9-B21; A9-B22; A9-B23; A9-B24; A9-B25; A9-B26; A9-B27; A9-B28; A9-B29; A9-B30; A9-B31; A9-B32; A9-B33; A9-B34; A9-B35; A9-B36; A9-B37; A9-B38; A9-B39; A9-B40; A9-B41; A9-B42; A9-B43; A9-B44; A9-B45; A9-B46; A9-B47; A9-B48; A9-B49; A9-B50; A9-B51; A9-B52; A9-B53; A9-B54; A9-B55; A9-B56; A9-B57; A9-B58; A9-B59; A9-B60; A9-B61; A9-B62; A9-B63; A9-B64; A9-B65; A9-B66; A9-B67; A9-B68; A9-B69; A9-B70; A9-B71; A9-B72; A9-B73; A9-B74; A9-B75; A9-B76; A9-B77; A9-B78; A9-B79; A9-B80; A9-B81; A9-B82; A9-B83; A9-B84; A9-B85; A9-B86; A9-B87; A9-B88; A9-B89; A9-B90; A9-B91; A9-B92; A9-B93; A9-B94; A9-B95; A9-B96; A9-B97; A9-B98; A9-B99; A9-B100; A9-B101; A9-B102; A9-B103; A9-B104; A9-B105; A9-B106; A9-B107; A9-B108; A9-B109; A9-B110; A9-B111; A9-B112; A9-B113;

[1550] A10-B1; A10-B2; A10-B3; A10-B4; A10-B5; A10-B6; A10-B7; A10-B8; A10-B9; A10-B10; A10-B11; A10-B12; A10-B13; A10-B14; A10-B15; A10-B16; A10-B17; A10-B18; A10-B19; A10-B20; A10-B21; A10-B22; A10-B23; A10-B24; A10-B25; A10-B26; A10-B27; A10-B28; A10-B29; A10-B30; A10-B31; A10-B32; A10-B33; A10-B34; A10-B35; A10-B36; A10-B37; A10-B38; A10-B39; A10-B40; A10-B41; A10-B42; A10-B43; A10-B44; A10-B45; A10-B46; A10-B47; A10-B48; A10-B49; A10-B50; A10-B51; A10-B52; A10-B53; A10-B54; A10-B55; A10-B56; A10-B57; A10-B58; A10-B59; A10-B60; A10-B61; A10-B62; A10-B63; A10-B64; A10-B65; A10-B66; A10-B67; A10-B68; A10-B69; A10-B70; A10-B71; A10-B72; A10-B73; A10-B74; A10-B75; A10-B76; A10-B77; A10-B78; A10-B79; A10-B80; A10-B81; A10-B82; A10-B83; A10-B84; A10-B85; A10-B86; A10-B87; A10-B88; A10-B89; A10-B90; A10-B91; A10-B92; A10-B93; A10-B94; A10-B95; A10-B96; A10-B97; A10-B98; A10-B99; A10-B100; A10-B101; A10-B102; A10-B103; A10-B104; A10-B105; A10-B106; A10-B107; A10-B108; A10-B109; A10-B110; A10-B111; A10-B112; A10-B113;

[1551] A11-B1; A11-B2; A11-B3; A11-B4; A11-B5; A11-B6; A11-B7; A11-B8; A11-B9; A11-B10; A11-B11; A11-B12; A11-B13; A11-B14; A11-B15; A11-B16; A11-B17; A11-B18; A11-B19; A11-B20; A11-B21; A11-B22; A11-B23; A11-B24; A11-B25; A11-B26; A11-B27; A11-B28; A11-B29; A11-B30; A11-B31; A11-B32; A11-B33; A11-B34; A11-B35; A11-B36; A11-B37; A11-B38; A11-B39; A11-B40; A11-B41; A11-B42; A11-B43; A11-B44; A11-B45; A11-B46; A11-B47; A11-B48; A11-B49; A11-B50; A11-B51; A11-B52; A11-B53; A11-B54; A11-B55; A11-B56; A11-B57; A11-B58; A11-B59; A11-B60; A11-B61; A11-B62; A11-B63; A11-B64; A11-B65; A11-B66; A11-B67; A11-B68; A11-B69; A11-B70; A11-B71; A11-B72; A11-B73; A11-B74; A11-B75; A11-B76; A11-B77; A11-B78; A11-B79; A11-B80; A11-B81; A11-B82; A11-B83; A11-B84; A11-B85; A11-B86; A11-B87; A11-B88; A11-B89; A11-B90; A11-B91; A11-B92; A11-B93; A11-B94; A11-B95; A11-B96; A11-B97; A11-B98; A11-B99; A11-B100; A11-B101; A11-B102; A11-B103; A11-B104; A11-B105; A11-B106; A11-B107; A11-B108; A11-B109; A11-B110; A11-B111; A11-B112; A11-B113;

[1552] A12-B1; A12-B2; A12-B3; A12-B4; A12-B5; A12-B6; A12-B7; A12-B8; A12-B9; A12-B10; A12-B11; A12-B12; A12-B13; A12-B14; A12-B15; A12-B16; A12-B17; A12-B18; A12-B19; A12-B20; A12-B21; A12-B22; A12-B23; A12-B24; A12-B25; A12-B26; A12-B27; A12-B28; A12-B29; A12-B30; A12-B31; A12-B32; A12-B33; A12-B34; A12-B35; A12-B36; A12-B37; A12-B38; A12-B39; A12-B40; A12-B41; A12-B42; A12-B43; A12-B44; A12-B45; A12-B46; A12-B47; A12-B48; A12-B49; A12-B50; A12-B51; A12-B52; A12-B53; A12-B54; A12-B55; A12-B56; A12-B57; A12-B58; A12-B59; A12-B60; A12-B61; A12-B62; A12-B63; A12-B64; A12-B65; A12-B66; A12-B67; A12-B68; A12-B69; A12-B70; A12-B71; A12-B72; A12-B73; A12-B74; A12-B75; A12-B76; A12-B77; A12-B78; A12-B79; A12-B80; A12-B81; A12-B82; A12-B83; A12-B84; A12-B85; A12-B86; A12-B87; A12-B88; A12-B89; A12-B90; A12-B91; A12-B92; A12-B93; A12-B94; A12-B95; A12-B96; A12-B97; A12-B98; A12-B99; A12-B100; A12-B101; A12-B102; A12-B103; A12-B104; A12-B105; A12-B106; A12-B107; A12-B108; A12-B109; A12-B110; A12-B111; A12-B112; A12-B113;

[1553] A13-B1; A13-B2; A13-B3; A13-B4; A13-B5; A13-B6; A13-B7; A13-B8; A13-B9; A13-B10; A13-B11; A13-B12; A13-B13; A13-B14; A13-B15; A13-B16; A13-B17; A13-B18; A13-B19; A13-B20; A13-B21; A13-B22; A13-B23; A13-B24; A13-B25; A13-B26; A13-B27; A13-B28; A13-B29; A13-B30; A13-B31; A13-B32; A13-B33; A13-B34; A13-B35; A13-B36; A13-B37; A13-B38; A13-B39; A13-B40; A13-B41; A13-B42; A13-B43; A13-B44; A13-B45; A13-B46; A13-B47; A13-B48; A13-B49; A13-B50; A13-B51; A13-B52; A13-B53; A13-B54; A13-B55; A13-B56; A13-B57; A13-B58; A13-B59; A13-B60; A13-B61; A13-B62; A13-B63; A13-B64; A13-B65; A13-B66; A13-B67; A13-B68; A13-B69; A13-B70; A13-B71; A13-B72; A13-B73; A13-B74; A13-B75; A13-B76; A13-B77; A13-B78; A13-B79; A13-B80; A13-B81; A13-B82; A13-B83; A13-B84; A13-B85; A13-B86; A13-B87; A13-B88; A13-B89; A13-B90; A13-B91; A13-B92; A13-B93; A13-B94; A13-B95; A13-B96; A13-B97; A13-B98; A13-B99; A13-B100; A13-B101; A13-B102; A13-B103; A13-B104; A13-B105; A13-B106; A13-B107; A13-B108; A13-B109; A13-B110; A13-B111; A13-B112; A13-B113;

[1554] A14-B1; A14-B2; A14-B3; A14-B4; A14-B5; A14-B6; A14-B7; A14-B8; A14-B9; A14-B10; A14-B11; A14-B12; A14-B13; A14-B14; A14-B15; A14-B16; A14-B17; A14-B18; A14-B19; A14-B20; A14-B21; A14-B22; A14-B23; A14-B24; A14-B25; A14-B26; A14-B27; A14-B28; A14-B29; A14-B30; A14-B31; A14-B32; A14-B33; A14-B34; A14-B35; A14-B36; A14-B37; A14-B38; A14-B39; A14-B40; A14-B41; A14-B42; A14-B43; A14-B44; A14-B45; A14-B46; A14-B47; A14-B48; A14-B49; A14-B50; A14-B51; A14-B52; A14-B53; A14-B54; A14-B55; A14-B56; A14-B57; A14-B58; A14-B59; A14-B60; A14-B61; A14-B62; A14-B63; A14-B64; A14-B65; A14-B66; A14-B67; A14-B68; A14-B69; A14-B70; A14-B71; A14-B72; A14-B73; A14-B74; A14-B75; A14-B76; A14-B77; A14-B78; A14-B79; A14-B80; A14-B81; A14-B82; A14-B83; A14-B84; A14-B85; A14-B86; A14-B87; A14-B88; A14-B89; A14-B90; A14-B91; A14-B92; A14-B93; A14-B94; A14-B95; A14-B96; A14-B97; A14-B98; A14-B99; A14-B100; A14-B101; A14-B102; A14-B103; A14-B104; A14-B105; A14-B106; A14-B107; A14-B108; A14-B109; A14-B110; A14-B111; A14-B112; A14-B113;

[1555] A15-B1; A15-B2; A15-B3; A15-B4; A15-B5; A15-B6; A15-B7; A15-B8; A15-B9; A15-B10; A15-B11; A15-B12; A15-B13; A15-B14; A15-B15; A15-B16; A15-B17; A15-B18; A15-B19; A15-B20; A15-B21; A15-B22; A15-B23; A15-B24; A15-B25; A15-B26; A15-B27; A15-B28; A15-B29; A15-B30; A15-B31; A15-B32; A15-B33; A15-B34; A15-B35; A15-B36; A15-B37; A15-B38; A15-B39; A15-B40; A15-B41; A15-B42; A15-B43; A15-B44; A15-B45; A15-B46; A15-B47; A15-B48; A15-B49; A15-B50; A15-B51; A15-B52; A15-B53; A15-B54; A15-B55; A15-B56; A15-B57; A15-B58; A15-B59; A15-B60; A15-B61; A15-B62; A15-B63; A15-B64; A15-B65; A15-B66; A15-B67; A15-B68; A15-B69; A15-B70; A15-B71; A15-B72; A15-B73; A15-B74; A15-B75; A15-B76; A15-B77; A15-B78; A15-B79; A15-B80; A15-B81; A15-B82; A15-B83; A15-B84; A15-B85; A15-B86; A15-B87; A15-B88; A15-B89; A15-B90; A15-B91; A15-B92; A15-B93; A15-B94; A15-B95; A15-B96; A15-B97; A15-B98; A15-B99; A15-B100; A15-B101; A15-B102; A15-B103; A15-B104; A15-B105; A15-B106; A15-B107; A15-B108; A15-B109; A15-B110; A15-B111; A15-B112; A15-B113;

[1556] A16-B1; A16-B2; A16-B3; A16-B4; A16-B5; A16-B6; A16-B7; A16-B8; A16-B9; A16-B10; A16-B11; A16-B12; A16-B13; A16-B14; A16-B15; A16-B16; A16-B17; A16-B18; A16-B19; A16-B20; A16-B21; A16-B22; A16-B23; A16-B24; A16-B25; A16-B26; A16-B27; A16-B28; A16-B29; A16-B30; A16-B31; A16-B32; A16-B33; A16-B34; A16-B35; A16-B36; A16-B37; A16-B38; A16-B39; A16-B40; A16-B41; A16-B42; A16-B43; A16-B44; A16-B45; A16-B46; A16-B47; A16-B48; A16-B49; A16-B50; A16-B51; A16-B52; A16-B53; A16-B54; A16-B55; A16-B56; A16-B57; A16-B58; A16-B59; A16-B60; A16-B61; A16-B62; A16-B63; A16-B64; A16-B65; A16-B66; A16-B67; A16-B68; A16-B69; A16-B70; A16-B71; A16-B72; A16-B73; A16-B74; A16-B75; A16-B76; A16-B77; A16-B78; A16-B79; A16-B80; A16-B81; A16-B82; A16-B83; A16-B84; A16-B85; A16-B86; A16-B87; A16-B88; A16-B89; A16-B90; A16-B91; A16-B92; A16-B93; A16-B94; A16-B95; A16-B96; A16-B97; A16-B98; A16-B99; A16-B100; A16-B101; A16-B102; A16-B103; A16-B104; A16-B105; A16-B106; A16-B107; A16-B108; A16-B109; A16-B110; A16-B111; A16-B112; A16-B113;

[1557] A17-B1; A17-B2; A17-B3; A17-B4; A17-B5; A17-B6; A17-B7; A17-B8; A17-B9; A17-B10; A17-B11; A17-B12; A17-B13; A17-B14; A17-B15; A17-B16; A17-B17; A17-B18; A17-B19; A17-B20; A17-B21; A17-B22; A17-B23; A17-B24; A17-B25; A17-B26; A17-B27; A17-B28; A17-B29; A17-B30; A17-B31; A17-B32; A17-B33; A17-B34; A17-B35; A17-B36; A17-B37; A17-B38; A17-B39; A17-B40; A17-B41; A17-B42; A17-B43; A17-B44; A17-B45; A17-B46; A17-B47; A17-B48; A17-B49; A17-B50; A17-B51; A17-B52; A17-B53; A17-B54; A17-B55; A17-B56; A17-B57; A17-B58; A17-B59; A17-B60; A17-B61; A17-B62; A17-B63; A17-B64; A17-B65; A17-B66; A17-B67; A17-B68; A17-B69; A17-B70; A17-B71; A17-B72; A17-B73; A17-B74; A17-B75; A17-B76; A17-B77; A17-B78; A17-B79; A17-B80; A17-B81; A17-B82; A17-B83; A17-B84; A17-B85; A17-B86; A17-B87; A17-B88; A17-B89; A17-B90; A17-B91; A17-B92; A17-B93; A17-B94; A17-B95; A17-B96; A17-B97; A17-B98; A17-B99; A17-B100; A17-B101; A17-B102; A17-B103; A17-B104; A17-B105; A17-B106; A17-B107; A17-B108; A17-B109; A17-B110; A17-B111; A17-B112; A17-B113;

[1558] A18-B1; A18-B2; A18-B3; A18-B4; A18-B5; A18-B6; A18-B7; A18-B8; A18-B9; A18-B10; A18-B11; A18-B12; A18-B13; A18-B14; A18-B15; A18-B16; A18-B17; A18-B18; A18-B19; A18-B20; A18-B21; A18-B22; A18-B23; A18-B24; A18-B25; A18-B26; A18-B27; A18-B28; A18-B29; A18-B30; A18-B31; A18-B32; A18-B33; A18-B34; A18-B35; A18-B36; A18-B37; A18-B38; A18-B39; A18-B40; A18-B41; A18-B42; A18-B43; A18-B44; A18-B45; A18-B46; A18-B47; A18-B48; A18-B49; A18-B50; A18-B51; A18-B52; A18-B53; A18-B54; A18-B55; A18-B56; A18-B57; A18-B58; A18-B59; A18-B60; A18-B61; A18-B62; A18-B63; A18-B64; A18-B65; A18-B66; A18-B67; A18-B68; A18-B69; A18-B70; A18-B71; A18-B72; A18-B73; A18-B74; A18-B75; A18-B76; A18-B77; A18-B78; A18-B79; A18-B80; A18-B81; A18-B82; A18-B83; A18-B84; A18-B85; A18-B86; A18-B87; A18-B88; A18-B89; A18-B90; A18-B91; A18-B92; A18-B93; A18-B94; A18-B95; A18-B96; A18-B97; A18-B98; A18-B99; A18-B100; A18-B101; A18-B102; A18-B103; A18-B104; A18-B105; A18-B106; A18-B107; A18-B108; A18-B109; A18-B110; A18-B111; A18-B112; A18-B113;

[1559] A19-B1; A19-B2; A19-B3; A19-B4; A19-B5; A19-B6; A19-B7; A19-B8; A19-B9; A19-B10; A19-B11; A19-B12; A19-B13; A19-B14; A19-B15; A19-B16; A19-B17; A19-B18; A19-B19; A19-B20; A19-B21; A19-B22; A19-B23; A19-B24; A19-B25; A19-B26; A19-B27; A19-B28; A19-B29; A19-B30; A19-B31; A19-B32; A19-B33; A19-B34; A19-B35; A19-B36; A19-B37; A19-B38; A19-B39; A19-B40; A19-B41; A19-B42; A19-B43; A19-B44; A19-B45; A19-B46; A19-B47; A19-B48; A19-B49; A19-B50; A19-B51; A19-B52; A19-B53; A19-B54; A19-B55; A19-B56; A19-B57; A19-B58; A19-B59; A19-B60; A19-B61; A19-B62; A19-B63; A19-B64; A19-B65; A19-B66; A19-B67; A19-B68; A19-B69; A19-B70; A19-B71; A19-B72; A19-B73; A19-B74; A19-B75; A19-B76; A19-B77; A19-B78; A19-B79; A19-B80; A19-B81; A19-B82; A19-B83; A19-B84; A19-B85; A19-B86; A19-B87; A19-B88; A19-B89; A19-B90; A19-B91; A19-B92; A19-B93; A19-B94; A19-B95; A19-B96; A19-B97; A19-B98; A19-B99; A19-B100; A19-B101; A19-B102; A19-B103; A19-B104; A19-B105; A19-B106; A19-B107; A19-B108; A19-B109; A19-B110; A19-B111; A19-B112; A19-B113;

[1560] A20-B1; A20-B2; A20-B3; A20-B4; A20-B5; A20-B6; A20-B7; A20-B8; A20-B9; A20-B10; A20-B11; A20-B12; A20-B13; A20-B14; A20-B15; A20-B16; A20-B17; A20-B18; A20-B19; A20-B20; A20-B21; A20-B22; A20-B23; A20-B24; A20-B25; A20-B26; A20-B27; A20-B28; A20-B29; A20-B30; A20-B31; A20-B32; A20-B33; A20-B34; A20-B35; A20-B36; A20-B37; A20-B38; A20-B39; A20-B40; A20-B41; A20-B42; A20-B43; A20-B44; A20-B45; A20-B46; A20-B47; A20-B48; A20-B49; A20-B50; A20-B51; A20-B52; A20-B53; A20-B54; A20-B55; A20-B56; A20-B57; A20-B58; A20-B59; A20-B60; A20-B61; A20-B62; A20-B63; A20-B64; A20-B65; A20-B66; A20-B67; A20-B68; A20-B69; A20-B70; A20-B71; A20-B72; A20-B73; A20-B74; A20-B75; A20-B76; A20-B77; A20-B78; A20-B79; A20-B80; A20-B81; A20-B82; A20-B83; A20-B84; A20-B85; A20-B86; A20-B87; A20-B88; A20-B89; A20-B90; A20-B91; A20-B92; A20-B93; A20-B94; A20-B95; A20-B96; A20-B97; A20-B98; A20-B99; A20-B100; A20-B101; A20-B102; A20-B103; A20-B104; A20-B105; A20-B106; A20-B107; A20-B108; A20-B109; A20-B110; A20-B111; A20-B112; A20-B113;

[1561] A21-B1; A21-B2; A21-B3; A21-B4; A21-B5; A21-B6; A21-B7; A21-B8; A21-B9; A21-B10; A21-B11; A21-B12; A21-B13; A21-B14; A21-B15; A21-B16; A21-B17; A21-B18; A21-B19; A21-B20; A21-B21; A21-B22; A21-B23; A21-B24; A21-B25; A21-B26; A21-B27; A21-B28; A21-B29; A21-B30; A21-B31; A21-B32; A21-B33; A21-B34; A21-B35; A21-B36; A21-B37; A21-B38; A21-B39; A21-B40; A21-B41; A21-B42; A21-B43; A21-B44; A21-B45; A21-B46; A21-B47; A21-B48; A21-B49; A21-B50; A21-B51; A21-B52; A21-B53; A21-B54; A21-B55; A21-B56; A21-B57; A21-B58; A21-B59; A21-B60; A21-B61; A21-B62; A21-B63; A21-B64; A21-B65; A21-B66; A21-B67; A21-B68; A21-B69; A21-B70; A21-B71; A21-B72; A21-B73; A21-B74; A21-B75; A21-B76; A21-B77; A21-B78; A21-B79; A21-B80; A21-B81; A21-B82; A21-B83; A21-B84; A21-B85; A21-B86; A21-B87; A21-B88; A21-B89; A21-B90; A21-B91; A21-B92; A21-B93; A21-B94; A21-B95; A21-B96; A21-B97; A21-B98; A21-B99; A21-B100; A21-B101; A21-B102; A21-B103; A21-B104; A21-B105; A21-B106; A21-B107; A21-B108; A21-B109; A21-B110; A21-B111; A21-B112; A21-B113;

[1562] A22-B1; A22-B2; A22-B3; A22-B4; A22-B5; A22-B6; A22-B7; A22-B8; A22-B9; A22-B10; A22-B11; A22-B12; A22-B13; A22-B14; A22-B15; A22-B16; A22-B17; A22-B18; A22-B19; A22-B20; A22-B21; A22-B22; A22-B23; A22-B24; A22-B25; A22-B26; A22-B27; A22-B28; A22-B29; A22-B30; A22-B31; A22-B32; A22-B33; A22-B34; A22-B35; A22-B36; A22-B37; A22-B38; A22-B39; A22-B40; A22-B41; A22-B42; A22-B43; A22-B44; A22-B45; A22-B46; A22-B47; A22-B48; A22-B49; A22-B50; A22-B51; A22-B52; A22-B53; A22-B54; A22-B55; A22-B56; A22-B57; A22-B58; A22-B59; A22-B60; A22-B61; A22-B62; A22-B63; A22-B64; A22-B65; A22-B66; A22-B67; A22-B68; A22-B69; A22-B70; A22-B71; A22-B72; A22-B73; A22-B74; A22-B75; A22-B76; A22-B77; A22-B78; A22-B79; A22-B80; A22-B81; A22-B82; A22-B83; A22-B84; A22-B85; A22-B86; A22-B87; A22-B88; A22-B89; A22-B90; A22-B91; A22-B92; A22-B93; A22-B94; A22-B95; A22-B96; A22-B97; A22-B98; A22-B99; A22-B100; A22-B101; A22-B102; A22-B103; A22-B104; A22-B105; A22-B106; A22-B107; A22-B108; A22-B109; A22-B110; A22-B111; A22-B112; A22-B113;

[1563] A23-B1; A23-B2; A23-B3; A23-B4; A23-B5; A23-B6; A23-B7; A23-B8; A23-B9; A23-B10; A23-B11; A23-B12; A23-B13; A23-B14; A23-B15; A23-B16; A23-B17; A23-B18; A23-B19; A23-B20; A23-B21; A23-B22; A23-B23; A23-B24; A23-B25; A23-B26; A23-B27; A23-B28; A23-B29; A23-B30; A23-B31; A23-B32; A23-B33; A23-B34; A23-B35; A23-B36; A23-B37; A23-B38; A23-B39; A23-B40; A23-B41; A23-B42; A23-B43; A23-B44; A23-B45; A23-B46; A23-B47; A23-B48; A23-B49; A23-B50; A23-B51; A23-B52; A23-B53; A23-B54; A23-B55; A23-B56; A23-B57; A23-B58; A23-B59; A23-B60; A23-B61; A23-B62; A23-B63; A23-B64; A23-B65; A23-B66; A23-B67; A23-B68; A23-B69; A23-B70; A23-B71; A23-B72; A23-B73; A23-B74; A23-B75; A23-B76; A23-B77; A23-B78; A23-B79; A23-B80; A23-B81; A23-B82; A23-B83; A23-B84; A23-B85; A23-B86; A23-B87; A23-B88; A23-B89; A23-B90; A23-B91; A23-B92; A23-B93; A23-B94; A23-B95; A23-B96; A23-B97; A23-B98; A23-B99; A23-B100; A23-B101; A23-B102; A23-B103; A23-B104; A23-B105; A23-B106; A23-B107; A23-B108; A23-B109; A23-B110; A23-B111; A23-B112; A23-B113;

[1564] A24-B1; A24-B2; A24-B3; A24-B4; A24-B5; A24-B6; A24-B7; A24-B8; A24-B9; A24-B10; A24-B11; A24-B12; A24-B13; A24-B14; A24-B15; A24-B16; A24-B17; A24-B18; A24-B19; A24-B20; A24-B21; A24-B22; A24-B23; A24-B24; A24-B25; A24-B26; A24-B27; A24-B28; A24-B29; A24-B30; A24-B31; A24-B32; A24-B33; A24-B34; A24-B35; A24-B36; A24-B37; A24-B38; A24-B39; A24-B40; A24-B41; A24-B42; A24-B43; A24-B44; A24-B45; A24-B46; A24-B47; A24-B48; A24-B49; A24-B50; A24-B51; A24-B52; A24-B53; A24-B54; A24-B55; A24-B56; A24-B57; A24-B58; A24-B59; A24-B60; A24-B61; A24-B62; A24-B63; A24-B64; A24-B65; A24-B66; A24-B67; A24-B68; A24-B69; A24-B70; A24-B71; A24-B72; A24-B73; A24-B74; A24-B75; A24-B76; A24-B77; A24-B78; A24-B79; A24-B80; A24-B81; A24-B82; A24-B83; A24-B84; A24-B85; A24-B86; A24-B87; A24-B88; A24-B89; A24-B90; A24-B91; A24-B92; A24-B93; A24-B94; A24-B95; A24-B96; A24-B97; A24-B98; A24-B99; A24-B100; A24-B101; A24-B102; A24-B103; A24-B104; A24-B105; A24-B106; A24-B107; A24-B108; A24-B109; A24-B110; A24-B111; A24-B112; A24-B113;

[1565] A25-B1; A25-B2; A25-B3; A25-B4; A25-B5; A25-B6; A25-B7; A25-B8; A25-B9; A25-B10; A25-B11; A25-B12; A25-B13; A25-B14; A25-B15; A25-B16; A25-B17; A25-B18; A25-B19; A25-B20; A25-B21; A25-B22; A25-B23; A25-B24; A25-B25; A25-B26; A25-B27; A25-B28; A25-B29; A25-B30; A25-B31; A25-B32; A25-B33; A25-B34; A25-B35; A25-B36; A25-B37; A25-B38; A25-B39; A25-B40; A25-B41; A25-B42; A25-B43; A25-B44; A25-B45; A25-B46; A25-B47; A25-B48; A25-B49; A25-B50; A25-B51; A25-B52; A25-B53; A25-B54; A25-B55; A25-B56; A25-B57; A25-B58; A25-B59; A25-B60; A25-B61; A25-B62; A25-B63; A25-B64; A25-B65; A25-B66; A25-B67; A25-B68; A25-B69; A25-B70; A25-B71; A25-B72; A25-B73; A25-B74; A25-B75; A25-B76; A25-B77; A25-B78; A25-B79; A25-B80; A25-B81; A25-B82; A25-B83; A25-B84; A25-B85; A25-B86; A25-B87; A25-B88; A25-B89; A25-B90; A25-B91; A25-B92; A25-B93; A25-B94; A25-B95; A25-B96; A25-B97; A25-B98; A25-B99; A25-B100; A25-B101; A25-B102; A25-B103; A25-B104; A25-B105; A25-B106; A25-B107; A25-B108; A25-B109; A25-B110; A25-B111; A25-B112; A25-B113;

[1566] A26-B1; A26-B2; A26-B3; A26-B4; A26-B5; A26-B6; A26-B7; A26-B8; A26-B9; A26-B10; A26-B11; A26-B12; A26-B13; A26-B14; A26-B15; A26-B16; A26-B17; A26-B18; A26-B19; A26-B20; A26-B21; A26-B22; A26-B23; A26-B24; A26-B25; A26-B26; A26-B27; A26-B28; A26-B29; A26-B30; A26-B31; A26-B32; A26-B33; A26-B34; A26-B35; A26-B36; A26-B37; A26-B38; A26-B39; A26-B40; A26-B41; A26-B42; A26-B43; A26-B44; A26-B45; A26-B46; A26-B47; A26-B48; A26-B49; A26-B50; A26-B51; A26-B52; A26-B53; A26-B54; A26-B55; A26-B56; A26-B57; A26-B58; A26-B59; A26-B60; A26-B61; A26-B62; A26-B63; A26-B64; A26-B65; A26-B66; A26-B67; A26-B68; A26-B69; A26-B70; A26-B71; A26-B72; A26-B73; A26-B74; A26-B75; A26-B76; A26-B77; A26-B78; A26-B79; A26-B80; A26-B81; A26-B82; A26-B83; A26-B84; A26-B85; A26-B86; A26-B87; A26-B88; A26-B89; A26-B90; A26-B91; A26-B92; A26-B93; A26-B94; A26-B95; A26-B96; A26-B97; A26-B98; A26-B99; A26-B100; A26-B101; A26-B102; A26-B103; A26-B104; A26-B105; A26-B106; A26-B107; A26-B108; A26-B109; A26-B110; A26-B111; A26-B112; A26-B113;

[1567] A27-B1; A27-B2; A27-B3; A27-B4; A27-B5; A27-B6; A27-B7; A27-B8; A27-B9; A27-B10; A27-B11; A27-B12; A27-B13; A27-B14; A27-B15; A27-B16; A27-B17; A27-B18; A27-B19; A27-B20; A27-B21; A27-B22; A27-B23; A27-B24; A27-B25; A27-B26; A27-B27; A27-B28; A27-B29; A27-B30; A27-B31; A27-B32; A27-B33; A27-B34; A27-B35; A27-B36; A27-B37; A27-B38; A27-B39; A27-B40; A27-B41; A27-B42; A27-B43; A27-B44; A27-B45; A27-B46; A27-B47; A27-B48; A27-B49; A27-B50; A27-B51; A27-B52; A27-B53; A27-B54; A27-B55; A27-B56; A27-B57; A27-B58; A27-B59; A27-B60; A27-B61; A27-B62; A27-B63; A27-B64; A27-B65; A27-B66; A27-B67; A27-B68; A27-B69; A27-B70; A27-B71; A27-B72; A27-B73; A27-B74; A27-B75; A27-B76; A27-B77; A27-B78; A27-B79; A27-B80; A27-B81; A27-B82; A27-B83; A27-B84; A27-B85; A27-B86; A27-B87; A27-B88; A27-B89; A27-B90; A27-B91; A27-B92; A27-B93; A27-B94; A27-B95; A27-B96; A27-B97; A27-B98; A27-B99; A27-B100; A27-B101; A27-B102; A27-B103; A27-B104; A27-B105; A27-B106; A27-B107; A27-B108; A27-B109; A27-B110; A27-B111; A27-B112; A27-B113;

[1568] A28-B1; A28-B2; A28-B3; A28-B4; A28-B5; A28-B6; A28-B7; A28-B8; A28-B9; A28-B10; A28-B11; A28-B12; A28-B13; A28-B14; A28-B15; A28-B16; A28-B17; A28-B18; A28-B19; A28-B20; A28-B21; A28-B22; A28-B23; A28-B24; A28-B25; A28-B26; A28-B27; A28-B28; A28-B29; A28-B30; A28-B31; A28-B32; A28-B33; A28-B34; A28-B35; A28-B36; A28-B37; A28-B38; A28-B39; A28-B40; A28-B41; A28-B42; A28-B43; A28-B44; A28-B45; A28-B46; A28-B47; A28-B48; A28-B49; A28-B50; A28-B51; A28-B52; A28-B53; A28-B54; A28-B55; A28-B56; A28-B57; A28-B58; A28-B59; A28-B60; A28-B61; A28-B62; A28-B63; A28-B64; A28-B65; A28-B66; A28-B67; A28-B68; A28-B69; A28-B70; A28-B71; A28-B72; A28-B73; A28-B74; A28-B75; A28-B76; A28-B77; A28-B78; A28-B79; A28-B80; A28-B81; A28-B82; A28-B83; A28-B84; A28-B85; A28-B86; A28-B87; A28-B88; A28-B89; A28-B90; A28-B91; A28-B92; A28-B93; A28-B94; A28-B95; A28-B96; A28-B97; A28-B98; A28-B99; A28-B100; A28-B101; A28-B102; A28-B103; A28-B104; A28-B105; A28-B106; A28-B107; A28-B108; A28-B109; A28-B110; A28-B111; A28-B112; A28-B113;

[1569] A29-B1; A29-B2; A29-B3; A29-B4; A29-B5; A29-B6; A29-B7; A29-B8; A29-B9; A29-B10; A29-B11; A29-B12; A29-B13; A29-B14; A29-B15; A29-B16; A29-B17; A29-B18; A29-B19; A29-B20; A29-B21; A29-B22; A29-B23; A29-B24; A29-B25; A29-B26; A29-B27; A29-B28; A29-B29; A29-B30; A29-B31; A29-B32; A29-B33; A29-B34; A29-B35; A29-B36; A29-B37; A29-B38; A29-B39; A29-B40; A29-B41; A29-B42; A29-B43; A29-B44; A29-B45; A29-B46; A29-B47; A29-B48; A29-B49; A29-B50; A29-B51; A29-B52; A29-B53; A29-B54; A29-B55; A29-B56; A29-B57; A29-B58; A29-B59; A29-B60; A29-B61; A29-B62; A29-B63; A29-B64; A29-B65; A29-B66; A29-B67; A29-B68; A29-B69; A29-B70; A29-B71; A29-B72; A29-B73; A29-B74; A29-B75; A29-B76; A29-B77; A29-B78; A29-B79; A29-B80; A29-B81; A29-B82; A29-B83; A29-B84; A29-B85; A29-B86; A29-B87; A29-B88; A29-B89; A29-B90; A29-B91; A29-B92; A29-B93; A29-B94; A29-B95; A29-B96; A29-B97; A29-B98; A29-B99; A29-B100; A29-B101; A29-B102; A29-B103; A29-B104; A29-B105; A29-B106; A29-B107; A29-B108; A29-B109; A29-B110; A29-B111; A29-B112; A29-B113;

[1570] A30-B1; A30-B2; A30-B3; A30-B4; A30-B5; A30-B6; A30-B7; A30-B8; A30-B9; A30-B10; A30-B11; A30-B12; A30-B13; A30-B14; A30-B15; A30-B16; A30-B17; A30-B18; A30-B19; A30-B20; A30-B21; A30-B22; A30-B23; A30-B24; A30-B25; A30-B26; A30-B27; A30-B28; A30-B29; A30-B30; A30-B31; A30-B32; A30-B33; A30-B34; A30-B35; A30-B36; A30-B37; A30-B38; A30-B39; A30-B40; A30-B41; A30-B42; A30-B43; A30-B44; A30-B45; A30-B46; A30-B47; A30-B48; A30-B49; A30-B50; A30-B51; A30-B52; A30-B53; A30-B54; A30-B55; A30-B56; A30-B57; A30-B58; A30-B59; A30-B60; A30-B61; A30-B62; A30-B63; A30-B64; A30-B65; A30-B66; A30-B67; A30-B68; A30-B69; A30-B70; A30-B71; A30-B72; A30-B73; A30-B74; A30-B75; A30-B76; A30-B77; A30-B78; A30-B79; A30-B80; A30-B81; A30-B82; A30-B83; A30-B84; A30-B85; A30-B86; A30-B87; A30-B88; A30-B89; A30-B90; A30-B91; A30-B92; A30-B93; A30-B94; A30-B95; A30-B96; A30-B97; A30-B98; A30-B99; A30-B100; A30-B101; A30-B102; A30-B103; A30-B104; A30-B105; A30-B106; A30-B107; A30-B108; A30-B109; A30-B110; A30-B111; A30-B112; A30-B113;

[1571] A31-B1; A31-B2; A31-B3; A31-B4; A31-B5; A31-B6; A31-B7; A31-B8; A31-B9; A31-B10; A31-B11; A31-B12; A31-B13; A31-B14; A31-B15; A31-B16; A31-B17; A31-B18; A31-B19; A31-B20; A31-B21; A31-B22; A31-B23; A31-B24; A31-B25; A31-B26; A31-B27; A31-B28; A31-B29; A31-B30; A31-B31; A31-B32; A31-B33; A31-B34; A31-B35; A31-B36; A31-B37; A31-B38; A31-B39; A31-B40; A31-B41; A31-B42; A31-B43; A31-B44; A31-B45; A31-B46; A31-B47; A31-B48; A31-B49; A31-B50; A31-B51; A31-B52; A31-B53; A31-B54; A31-B55; A31-B56; A31-B57; A31-B58; A31-B59; A31-B60; A31-B61; A31-B62; A31-B63; A31-B64; A31-B65; A31-B66; A31-B67; A31-B68; A31-B69; A31-B70; A31-B71; A31-B72; A31-B73; A31-B74; A31-B75; A31-B76; A31-B77; A31-B78; A31-B79; A31-B80; A31-B81; A31-B82; A31-B83; A31-B84; A31-B85; A31-B86; A31-B87; A31-B88; A31-B89; A31-B90; A31-B91; A31-B92; A31-B93; A31-B94; A31-B95; A31-B96; A31-B97; A31-B98; A31-B99; A31-B100; A31-B101; A31-B102; A31-B103; A31-B104; A31-B105; A31-B106; A31-B107; A31-B108; A31-B109; A31-B110; A31-B111; A31-B112; A31-B113;

[1572] A32-B1; A32-B2; A32-B3; A32-B4; A32-B5; A32-B6; A32-B7; A32-B8; A32-B9; A32-B10; A32-B11; A32-B12; A32-B13; A32-B14; A32-B15; A32-B16; A32-B17; A32-B18; A32-B19; A32-B20; A32-B21; A32-B22; A32-B23; A32-B24; A32-B25; A32-B26; A32-B27; A32-B28; A32-B29; A32-B30; A32-B31; A32-B32; A32-B33; A32-B34; A32-B35; A32-B36; A32-B37; A32-B38; A32-B39; A32-B40; A32-B41; A32-B42; A32-B43; A32-B44; A32-B45; A32-B46; A32-B47; A32-B48; A32-B49; A32-B50; A32-B51; A32-B52; A32-B53; A32-B54; A32-B55; A32-B56; A32-B57; A32-B58; A32-B59; A32-B60; A32-B61; A32-B62; A32-B63; A32-B64; A32-B65; A32-B66; A32-B67; A32-B68; A32-B69; A32-B70; A32-B71; A32-B72; A32-B73; A32-B74; A32-B75; A32-B76; A32-B77; A32-B78; A32-B79; A32-B80; A32-B81; A32-B82; A32-B83; A32-B84; A32-B85; A32-B86; A32-B87; A32-B88; A32-B89; A32-B90; A32-B91; A32-B92; A32-B93; A32-B94; A32-B95; A32-B96; A32-B97; A32-B98; A32-B99; A32-B100; A32-B101; A32-B102; A32-B103; A32-B104; A32-B105; A32-B106; A32-B107; A32-B108; A32-B109; A32-B110; A32-B111; A32-B112; A32-B113;

[1573] A33-B1; A33-B2; A33-B3; A33-B4; A33-B5; A33-B6; A33-B7; A33-B8; A33-B9; A33-B10; A33-B11; A33-B12; A33-B13; A33-B14; A33-B15; A33-B16; A33-B17; A33-B18; A33-B19; A33-B20; A33-B21; A33-B22; A33-B23; A33-B24; A33-B25; A33-B26; A33-B27; A33-B28; A33-B29; A33-B30; A33-B31; A33-B32; A33-B33; A33-B34; A33-B35; A33-B36; A33-B37; A33-B38; A33-B39; A33-B40; A33-B41; A33-B42; A33-B43; A33-B44; A33-B45; A33-B46; A33-B47; A33-B48; A33-B49; A33-B50; A33-B51; A33-B52; A33-B53; A33-B54; A33-B55; A33-B56; A33-B57; A33-B58; A33-B59; A33-B60; A33-B61; A33-B62; A33-B63; A33-B64; A33-B65; A33-B66; A33-B67; A33-B68; A33-B69; A33-B70; A33-B71; A33-B72; A33-B73; A33-B74; A33-B75; A33-B76; A33-B77; A33-B78; A33-B79; A33-B80; A33-B81; A33-B82; A33-B83; A33-B84; A33-B85; A33-B86; A33-B87; A33-B88; A33-B89; A33-B90; A33-B91; A33-B92; A33-B93; A33-B94; A33-B95; A33-B96; A33-B97; A33-B98; A33-B99; A33-B100; A33-B101; A33-B102; A33-B103; A33-B104; A33-B105; A33-B106; A33-B107; A33-B108; A33-B109; A33-B110; A33-B111; A33-B112; A33-B113;

[1574] A34-B1; A34-B2; A34-B3; A34-B4; A34-B5; A34-B6; A34-B7; A34-B8; A34-B9; A34-B10; A34-B11; A34-B12; A34-B13; A34-B14; A34-B15; A34-B16; A34-B17; A34-B18; A34-B19; A34-B20; A34-B21; A34-B22; A34-B23; A34-B24; A34-B25; A34-B26; A34-B27; A34-B28; A34-B29; A34-B30; A34-B31; A34-B32; A34-B33; A34-B34; A34-B35; A34-B36; A34-B37; A34-B38; A34-B39; A34-B40; A34-B41; A34-B42; A34-B43; A34-B44; A34-B45; A34-B46; A34-B47; A34-B48; A34-B49; A34-B50; A34-B51; A34-B52; A34-B53; A34-B54; A34-B55; A34-B56; A34-B57; A34-B58; A34-B59; A34-B60; A34-B61; A34-B62; A34-B63; A34-B64; A34-B65; A34-B66; A34-B67; A34-B68; A34-B69; A34-B70; A34-B71; A34-B72; A34-B73; A34-B74; A34-B75; A34-B76; A34-B77; A34-B78; A34-B79; A34-B80; A34-B81; A34-B82; A34-B83; A34-B84; A34-B85; A34-B86; A34-B87; A34-B88; A34-B89; A34-B90; A34-B91; A34-B92; A34-B93; A34-B94; A34-B95; A34-B96; A34-B97; A34-B98; A34-B99; A34-B100; A34-B101; A34-B102; A34-B103; A34-B104; A34-B105; A34-B106; A34-B107; A34-B108; A34-B109; A34-B110; A34-B111; A34-B112; A34-B113;

[1575] A35-B1; A35-B2; A35-B3; A35-B4; A35-B5; A35-B6; A35-B7; A35-B8; A35-B9; A35-B10; A35-B11; A35-B12; A35-B13; A35-B14; A35-B15; A35-B16; A35-B17; A35-B18; A35-B19; A35-B20; A35-B21; A35-B22; A35-B23; A35-B24; A35-B25; A35-B26; A35-B27; A35-B28; A35-B29; A35-B30; A35-B31; A35-B32; A35-B33; A35-B34; A35-B35; A35-B36; A35-B37; A35-B38; A35-B39; A35-B40; A35-B41; A35-B42; A35-B43; A35-B44; A35-B45; A35-B46; A35-B47; A35-B48; A35-B49; A35-B50; A35-B51; A35-B52; A35-B53; A35-B54; A35-B55; A35-B56; A35-B57; A35-B58; A35-B59; A35-B60; A35-B61; A35-B62; A35-B63; A35-B64; A35-B65; A35-B66; A35-B67; A35-B68; A35-B69; A35-B70; A35-B71; A35-B72; A35-B73; A35-B74; A35-B75; A35-B76; A35-B77; A35-B78; A35-B79; A35-B80; A35-B81; A35-B82; A35-B83; A35-B84; A35-B85; A35-B86; A35-B87; A35-B88; A35-B89; A35-B90; A35-B91; A35-B92; A35-B93; A35-B94; A35-B95; A35-B96; A35-B97; A35-B98; A35-B99; A35-B100; A35-B101; A35-B102; A35-B103; A35-B104; A35-B105; A35-B106; A35-B107; A35-B108; A35-B109; A35-B110; A35-B111; A35-B112; A35-B113;

[1576] A36-B1; A36-B2; A36-B3; A36-B4; A36-B5; A36-B6; A36-B7; A36-B8; A36-B9; A36-B10; A36-B11; A36-B12; A36-B13; A36-B14; A36-B15; A36-B16; A36-B17; A36-B18; A36-B19; A36-B20; A36-B21; A36-B22; A36-B23; A36-B24; A36-B25; A36-B26; A36-B27; A36-B28; A36-B29; A36-B30; A36-B31; A36-B32; A36-B33; A36-B34; A36-B35; A36-B36; A36-B37; A36-B38; A36-B39; A36-B40; A36-B41; A36-B42; A36-B43; A36-B44; A36-B45; A36-B46; A36-B47; A36-B48; A36-B49; A36-B50; A36-B51; A36-B52; A36-B53; A36-B54; A36-B55; A36-B56; A36-B57; A36-B58; A36-B59; A36-B60; A36-B61; A36-B62; A36-B63; A36-B64; A36-B65; A36-B66; A36-B67; A36-B68; A36-B69; A36-B70; A36-B71; A36-B72; A36-B73; A36-B74; A36-B75; A36-B76; A36-B77; A36-B78; A36-B79; A36-B80; A36-B81; A36-B82; A36-B83; A36-B84; A36-B85; A36-B86; A36-B87; A36-B88; A36-B89; A36-B90; A36-B91; A36-B92; A36-B93; A36-B94; A36-B95; A36-B96; A36-B97; A36-B98; A36-B99; A36-B100; A36-B101; A36-B102; A36-B103; A36-B104; A36-B105; A36-B106; A36-B107; A36-B108; A36-B109; A36-B110; A36-B111; A36-B112; A36-B113;

[1577] A37-B1; A37-B2; A37-B3; A37-B4; A37-B5; A37-B6; A37-B7; A37-B8; A37-B9; A37-B10; A37-B11; A37-B12; A37-B13; A37-B14; A37-B15; A37-B16; A37-B17; A37-B18; A37-B19; A37-B20; A37-B21; A37-B22; A37-B23; A37-B24; A37-B25; A37-B26; A37-B27; A37-B28; A37-B29; A37-B30; A37-B31; A37-B32; A37-B33; A37-B34; A37-B35; A37-B36; A37-B37; A37-B38; A37-B39; A37-B40; A37-B41; A37-B42; A37-B43; A37-B44; A37-B45; A37-B46; A37-B47; A37-B48; A37-B49; A37-B50; A37-B51; A37-B52; A37-B53; A37-B54; A37-B55; A37-B56; A37-B57; A37-B58; A37-B59; A37-B60; A37-B61; A37-B62; A37-B63; A37-B64; A37-B65; A37-B66; A37-B67; A37-B68; A37-B69; A37-B70; A37-B71; A37-B72; A37-B73; A37-B74; A37-B75; A37-B76; A37-B77; A37-B78; A37-B79; A37-B80; A37-B81; A37-B82; A37-B83; A37-B84; A37-B85; A37-B86; A37-B87; A37-B88; A37-B89; A37-B90; A37-B91; A37-B92; A37-B93; A37-B94; A37-B95; A37-B96; A37-B97; A37-B98; A37-B99; A37-B100; A37-B101; A37-B102; A37-B103; A37-B104; A37-B105; A37-B106; A37-B107; A37-B108; A37-B109; A37-B110; A37-B111; A37-B112; A37-B113;

[1578] A38-B1; A38-B2; A38-B3; A38-B4; A38-B5; A38-B6; A38-B7; A38-B8; A38-B9; A38-B10; A38-B11; A38-B12; A38-B13; A38-B14; A38-B15; A38-B16; A38-B17; A38-B18; A38-B19; A38-B20; A38-B21; A38-B22; A38-B23; A38-B24; A38-B25; A38-B26; A38-B27; A38-B28; A38-B29; A38-B30; A38-B31; A38-B32; A38-B33; A38-B34; A38-B35; A38-B36; A38-B37; A38-B38; A38-B39; A38-B40; A38-B41; A38-B42; A38-B43; A38-B44; A38-B45; A38-B46; A38-B47; A38-B48; A38-B49; A38-B50; A38-B51; A38-B52; A38-B53; A38-B54; A38-B55; A38-B56; A38-B57; A38-B58; A38-B59; A38-B60; A38-B61; A38-B62; A38-B63; A38-B64; A38-B65; A38-B66; A38-B67; A38-B68; A38-B69; A38-B70; A38-B71; A38-B72; A38-B73; A38-B74; A38-B75; A38-B76; A38-B77; A38-B78; A38-B79; A38-B80; A38-B81; A38-B82; A38-B83; A38-B84; A38-B85; A38-B86; A38-B87; A38-B88; A38-B89; A38-B90; A38-B91; A38-B92; A38-B93; A38-B94; A38-B95; A38-B96; A38-B97; A38-B98; A38-B99; A38-B100; A38-B101; A38-B102; A38-B103; A38-B104; A38-B105; A38-B106; A38-B107; A38-B108; A38-B109; A38-B110; A38-B111; A38-B112; A38-B113;

[1579] A39-B1; A39-B2; A39-B3; A39-B4; A39-B5; A39-B6; A39-B7; A39-B8; A39-B9; A39-B10; A39-B11; A39-B12; A39-B13; A39-B14; A39-B15; A39-B16; A39-B17; A39-B18; A39-B19; A39-B20; A39-B21; A39-B22; A39-B23; A39-B24; A39-B25; A39-B26; A39-B27; A39-B28; A39-B29; A39-B30; A39-B31; A39-B32; A39-B33; A39-B34; A39-B35; A39-B36; A39-B37; A39-B38; A39-B39; A39-B40; A39-B41; A39-B42; A39-B43; A39-B44; A39-B45; A39-B46; A39-B47; A39-B48; A39-B49; A39-B50; A39-B51; A39-B52; A39-B53; A39-B54; A39-B55; A39-B56; A39-B57; A39-B58; A39-B59; A39-B60; A39-B61; A39-B62; A39-B63; A39-B64; A39-B65; A39-B66; A39-B67; A39-B68; A39-B69; A39-B70; A39-B71; A39-B72; A39-B73; A39-B74; A39-B75; A39-B76; A39-B77; A39-B78; A39-B79; A39-B80; A39-B81; A39-B82; A39-B83; A39-B84; A39-B85; A39-B86; A39-B87; A39-B88; A39-B89; A39-B90; A39-B91; A39-B92; A39-B93; A39-B94; A39-B95; A39-B96; A39-B97; A39-B98; A39-B99; A39-B100; A39-B101; A39-B102; A39-B103; A39-B104; A39-B105; A39-B106; A39-B107; A39-B108; A39-B109; A39-B110; A39-B111; A39-B112; A39-B113;

[1580] A40-B1; A40-B2; A40-B3; A40-B4; A40-B5; A40-B6; A40-B7; A40-B8; A40-B9; A40-B10; A40-B11; A40-B12; A40-B13; A40-B14; A40-B15; A40-B16; A40-B17; A40-B18; A40-B19; A40-B20; A40-B21; A40-B22; A40-B23; A40-B24; A40-B25; A40-B26; A40-B27; A40-B28; A40-B29; A40-B30; A40-B31; A40-B32; A40-B33; A40-B34; A40-B35; A40-B36; A40-B37; A40-B38; A40-B39; A40-B40; A40-B41; A40-B42; A40-B43; A40-B44; A40-B45; A40-B46; A40-B47; A40-B48; A40-B49; A40-B50; A40-B51; A40-B52; A40-B53; A40-B54; A40-B55; A40-B56; A40-B57; A40-B58; A40-B59; A40-B60; A40-B61; A40-B62; A40-B63; A40-B64; A40-B65; A40-B66; A40-B67; A40-B68; A40-B69; A40-B70; A40-B71; A40-B72; A40-B73; A40-B74; A40-B75; A40-B76; A40-B77; A40-B78; A40-B79; A40-B80; A40-B81; A40-B82; A40-B83; A40-B84; A40-B85; A40-B86; A40-B87; A40-B88; A40-B89; A40-B90; A40-B91; A40-B92; A40-B93; A40-B94; A40-B95; A40-B96; A40-B97; A40-B98; A40-B99; A40-B100; A40-B101; A40-B102; A40-B103; A40-B104; A40-B105; A40-B106; A40-B107; A40-B108; A40-B109; A40-B110; A40-B111; A40-B112; A40-B113;

[1581] A41-B1; A41-B2; A41-B3; A41-B4; A41-B5; A41-B6; A41-B7; A41-B8; A41-B9; A41-B10; A41-B11; A41-B12; A41-B13; A41-B14; A41-B15; A41-B16; A41-B17; A41-B18; A41-B19; A41-B20; A41-B21; A41-B22; A41-B23; A41-B24; A41-B25; A41-B26; A41-B27; A41-B28; A41-B29; A41-B30; A41-B31; A41-B32; A41-B33; A41-B34; A41-B35; A41-B36; A41-B37; A41-B38; A41-B39; A41-B40; A41-B41; A41-B42; A41-B43; A41-B44; A41-B45; A41-B46; A41-B47; A41-B48; A41-B49; A41-B50; A41-B51; A41-B52; A41-B53; A41-B54; A41-B55; A41-B56; A41-B57; A41-B58; A41-B59; A41-B60; A41-B61; A41-B62; A41-B63; A41-B64; A41-B65; A41-B66; A41-B67; A41-B68; A41-B69; A41-B70; A41-B71; A41-B72; A41-B73; A41-B74; A41-B75; A41-B76; A41-B77; A41-B78; A41-B79; A41-B80; A41-B81; A41-B82; A41-B83; A41-B84; A41-B85; A41-B86; A41-B87; A41-B88; A41-B89; A41-B90; A41-B91; A41-B92; A41-B93; A41-B94; A41-B95; A41-B96; A41-B97; A41-B98; A41-B99; A41-B100; A41-B101; A41-B102; A41-B103; A41-B104; A41-B105; A41-B106; A41-B107; A41-B108; A41-B109; A41-B110; A41-B111; A41-B112; A41-B113;

[1582] A42-B1; A42-B2; A42-B3; A42-B4; A42-B5; A42-B6; A42-B7; A42-B8; A42-B9; A42-B10; A42-B11; A42-B12; A42-B13; A42-B14; A42-B15; A42-B16; A42-B17; A42-B18; A42-B19; A42-B20; A42-B21; A42-B22; A42-B23; A42-B24; A42-B25; A42-B26; A42-B27; A42-B28; A42-B29; A42-B30; A42-B31; A42-B32; A42-B33; A42-B34; A42-B35; A42-B36; A42-B37; A42-B38; A42-B39; A42-B40; A42-B41; A42-B42; A42-B43; A42-B44; A42-B45; A42-B46; A42-B47; A42-B48; A42-B49; A42-B50; A42-B51; A42-B52; A42-B53; A42-B54; A42-B55; A42-B56; A42-B57; A42-B58; A42-B59; A42-B60; A42-B61; A42-B62; A42-B63; A42-B64; A42-B65; A42-B66; A42-B67; A42-B68; A42-B69; A42-B70; A42-B71; A42-B72; A42-B73; A42-B74; A42-B75; A42-B76; A42-B77; A42-B78; A42-B79; A42-B80; A42-B81; A42-B82; A42-B83; A42-B84; A42-B85; A42-B86; A42-B87; A42-B88; A42-B89; A42-B90; A42-B91; A42-B92; A42-B93; A42-B94; A42-B95; A42-B96; A42-B97; A42-B98; A42-B99; A42-B100; A42-B101; A42-B102; A42-B103; A42-B104; A42-B105; A42-B106; A42-B107; A42-B108; A42-B109; A42-B110; A42-B111; A42-B112; A42-B113;

[1583] A43-B1; A43-B2; A43-B3; A43-B4; A43-B5; A43-B6; A43-B7; A43-B8; A43-B9; A43-B10; A43-B11; A43-B12; A43-B13; A43-B14; A43-B15; A43-B16; A43-B17; A43-B18; A43-B19; A43-B20; A43-B21; A43-B22; A43-B23; A43-B24; A43-B25; A43-B26; A43-B27; A43-B28; A43-B29; A43-B30; A43-B31; A43-B32; A43-B33; A43-B34; A43-B35; A43-B36; A43-B37; A43-B38; A43-B39; A43-B40; A43-B41; A43-B42; A43-B43; A43-B44; A43-B45; A43-B46; A43-B47; A43-B48; A43-B49; A43-B50; A43-B51; A43-B52; A43-B53; A43-B54; A43-B55; A43-B56; A43-B57; A43-B58; A43-B59; A43-B60; A43-B61; A43-B62; A43-B63; A43-B64; A43-B65; A43-B66; A43-B67; A43-B68; A43-B69; A43-B70; A43-B71; A43-B72; A43-B73; A43-B74; A43-B75; A43-B76; A43-B77; A43-B78; A43-B79; A43-B80; A43-B81; A43-B82; A43-B83; A43-B84; A43-B85; A43-B86; A43-B87; A43-B88; A43-B89; A43-B90; A43-B91; A43-B92; A43-B93; A43-B94; A43-B95; A43-B96; A43-B97; A43-B98; A43-B99; A43-B100; A43-B101; A43-B102; A43-B103; A43-B104; A43-B105; A43-B106; A43-B107; A43-B108; A43-B109; A43-B110; A43-B111; A43-B112; A43-B113;

[1584] A44-B1; A44-B2; A44-B3; A44-B4; A44-B5; A44-B6; A44-B7; A44-B8; A44-B9; A44-B10; A44-B11; A44-B12; A44-B13; A44-B14; A44-B15; A44-B16; A44-B17; A44-B18; A44-B19; A44-B20; A44-B21; A44-B22; A44-B23; A44-B24; A44-B25; A44-B26; A44-B27; A44-B28; A44-B29; A44-B30; A44-B31; A44-B32; A44-B33; A44-B34; A44-B35; A44-B36; A44-B37; A44-B38; A44-B39; A44-B40; A44-B41; A44-B42; A44-B43; A44-B44; A44-B45; A44-B46; A44-B47; A44-B48; A44-B49; A44-B50; A44-B51; A44-B52; A44-B53; A44-B54; A44-B55; A44-B56; A44-B57; A44-B58; A44-B59; A44-B60; A44-B61; A44-B62; A44-B63; A44-B64; A44-B65; A44-B66; A44-B67; A44-B68; A44-B69; A44-B70; A44-B71; A44-B72; A44-B73; A44-B74; A44-B75; A44-B76; A44-B77; A44-B78; A44-B79; A44-B80; A44-B81; A44-B82; A44-B83; A44-B84; A44-B85; A44-B86; A44-B87; A44-B88; A44-B89; A44-B90; A44-B91; A44-B92; A44-B93; A44-B94; A44-B95; A44-B96; A44-B97; A44-B98; A44-B99; A44-B100; A44-B101; A44-B102; A44-B103; A44-B104; A44-B105; A44-B106; A44-B107; A44-B108; A44-B109; A44-B110; A44-B111; A44-B112; A44-B113;

[1585] A45-B1; A45-B2; A45-B3; A45-B4; A45-B5; A45-B6; A45-B7; A45-B8; A45-B9; A45-B10; A45-B11; A45-B12; A45-B13; A45-B14; A45-B15; A45-B16; A45-B17; A45-B18; A45-B19; A45-B20; A45-B21; A45-B22; A45-B23; A45-B24; A45-B25; A45-B26; A45-B27; A45-B28; A45-B29; A45-B30; A45-B31; A45-B32; A45-B33; A45-B34; A45-B35; A45-B36; A45-B37; A45-B38; A45-B39; A45-B40; A45-B41; A45-B42; A45-B43; A45-B44; A45-B45; A45-B46; A45-B47; A45-B48; A45-B49; A45-B50; A45-B51; A45-B52; A45-B53; A45-B54; A45-B55; A45-B56; A45-B57; A45-B58; A45-B59; A45-B60; A45-B61; A45-B62; A45-B63; A45-B64; A45-B65; A45-B66; A45-B67; A45-B68; A45-B69; A45-B70; A45-B71; A45-B72; A45-B73; A45-B74; A45-B75; A45-B76; A45-B77; A45-B78; A45-B79; A45-B80; A45-B81; A45-B82; A45-B83; A45-B84; A45-B85; A45-B86; A45-B87; A45-B88; A45-B89; A45-B90; A45-B91; A45-B92; A45-B93; A45-B94; A45-B95; A45-B96; A45-B97; A45-B98; A45-B99; A45-B100; A45-B101; A45-B102; A45-B103; A45-B104; A45-B105; A45-B106; A45-B107; A45-B108; A45-B109; A45-B110; A45-B111; A45-B112; A45-B113;

[1586] A46-B1; A46-B2; A46-B3; A46-B4; A46-B5; A46-B6; A46-B7; A46-B8; A46-B9; A46-B10; A46-B11; A46-B12; A46-B13; A46-B14; A46-B15; A46-B16; A46-B17; A46-B18; A46-B19; A46-B20; A46-B21; A46-B22; A46-B23; A46-B24; A46-B25; A46-B26; A46-B27; A46-B28; A46-B29; A46-B30; A46-B31; A46-B32; A46-B33; A46-B34; A46-B35; A46-B36; A46-B37; A46-B38; A46-B39; A46-B40; A46-B41; A46-B42; A46-B43; A46-B44; A46-B45; A46-B46; A46-B47; A46-B48; A46-B49; A46-B50; A46-B51; A46-B52; A46-B53; A46-B54; A46-B55; A46-B56; A46-B57; A46-B58; A46-B59; A46-B60; A46-B61; A46-B62; A46-B63; A46-B64; A46-B65; A46-B66; A46-B67; A46-B68; A46-B69; A46-B70; A46-B71; A46-B72; A46-B73; A46-B74; A46-B75; A46-B76; A46-B77; A46-B78; A46-B79; A46-B80; A46-B81; A46-B82; A46-B83; A46-B84; A46-B85; A46-B86; A46-B87; A46-B88; A46-B89; A46-B90; A46-B91; A46-B92; A46-B93; A46-B94; A46-B95; A46-B96; A46-B97; A46-B98; A46-B99; A46-B100; A46-B101; A46-B102; A46-B103; A46-B104; A46-B105; A46-B106; A46-B107; A46-B108; A46-B109; A46-B110; A46-B111; A46-B112; A46-B113;

[1587] A47-B1; A47-B2; A47-B3; A47-B4; A47-B5; A47-B6; A47-B7; A47-B8; A47-B9; A47-B10; A47-B11; A47-B12; A47-B13; A47-B14; A47-B15; A47-B16; A47-B17; A47-B18; A47-B19; A47-B20; A47-B21; A47-B22; A47-B23; A47-B24; A47-B25; A47-B26; A47-B27; A47-B28; A47-B29; A47-B30; A47-B31; A47-B32; A47-B33; A47-B34; A47-B35; A47-B36; A47-B37; A47-B38; A47-B39; A47-B40; A47-B41; A47-B42; A47-B43; A47-B44; A47-B45; A47-B46; A47-B47; A47-B48; A47-B49; A47-B50; A47-B51; A47-B52; A47-B53; A47-B54; A47-B55; A47-B56; A47-B57; A47-B58; A47-B59; A47-B60; A47-B61; A47-B62; A47-B63; A47-B64; A47-B65; A47-B66; A47-B67; A47-B68; A47-B69; A47-B70; A47-B71; A47-B72; A47-B73; A47-B74; A47-B75; A47-B76; A47-B77; A47-B78; A47-B79; A47-B80; A47-B81; A47-B82; A47-B83; A47-B84; A47-B85; A47-B86; A47-B87; A47-B88; A47-B89; A47-B90; A47-B91; A47-B92; A47-B93; A47-B94; A47-B95; A47-B96; A47-B97; A47-B98; A47-B99; A47-B100; A47-B101; A47-B102; A47-B103; A47-B104; A47-B105; A47-B106; A47-B107; A47-B108; A47-B109; A47-B110; A47-B111; A47-B112; A47-B113;

[1588] A48-B1; A48-B2; A48-B3; A48-B4; A48-B5; A48-B6; A48-B7; A48-B8; A48-B9; A48-B10; A48-B11; A48-B12; A48-B13; A48-B14; A48-B15; A48-B16; A48-B17; A48-B18; A48-B19; A48-B20; A48-B21; A48-B22; A48-B23; A48-B24; A48-B25; A48-B26; A48-B27; A48-B28; A48-B29; A48-B30; A48-B31; A48-B32; A48-B33; A48-B34; A48-B35; A48-B36; A48-B37; A48-B38; A48-B39; A48-B40; A48-B41; A48-B42; A48-B43; A48-B44; A48-B45; A48-B46; A48-B47; A48-B48; A48-B49; A48-B50; A48-B51; A48-B52; A48-B53; A48-B54; A48-B55; A48-B56; A48-B57; A48-B58; A48-B59; A48-B60; A48-B61; A48-B62; A48-B63; A48-B64; A48-B65; A48-B66; A48-B67; A48-B68; A48-B69; A48-B70; A48-B71; A48-B72; A48-B73; A48-B74; A48-B75; A48-B76; A48-B77; A48-B78; A48-B79; A48-B80; A48-B81; A48-B82; A48-B83; A48-B84; A48-B85; A48-B86; A48-B87; A48-B88; A48-B89; A48-B90; A48-B91; A48-B92; A48-B93; A48-B94; A48-B95; A48-B96; A48-B97; A48-B98; A48-B99; A48-B100; A48-B101; A48-B102; A48-B103; A48-B104; A48-B105; A48-B106; A48-B107; A48-B108; A48-B109; A48-B110; A48-B111; A48-B112; A48-B113;

[1589] A49-B1; A49-B2; A49-B3; A49-B4; A49-B5; A49-B6; A49-B7; A49-B8; A49-B9; A49-B10; A49-B11; A49-B12; A49-B13; A49-B14; A49-B15; A49-B16; A49-B17; A49-B18; A49-B19; A49-B20; A49-B21; A49-B22; A49-B23; A49-B24; A49-B25; A49-B26; A49-B27; A49-B28; A49-B29; A49-B30; A49-B31; A49-B32; A49-B33; A49-B34; A49-B35; A49-B36; A49-B37; A49-B38; A49-B39; A49-B40; A49-B41; A49-B42; A49-B43; A49-B44; A49-B45; A49-B46; A49-B47; A49-B48; A49-B49; A49-B50; A49-B51; A49-B52; A49-B53; A49-B54; A49-B55; A49-B56; A49-B57; A49-B58; A49-B59; A49-B60; A49-B61; A49-B62; A49-B63; A49-B64; A49-B65; A49-B66; A49-B67; A49-B68; A49-B69; A49-B70; A49-B71; A49-B72; A49-B73; A49-B74; A49-B75; A49-B76; A49-B77; A49-B78; A49-B79; A49-B80; A49-B81; A49-B82; A49-B83; A49-B84; A49-B85; A49-B86; A49-B87; A49-B88; A49-B89; A49-B90; A49-B91; A49-B92; A49-B93; A49-B94; A49-B95; A49-B96; A49-B97; A49-B98; A49-B99; A49-B100; A49-B101; A49-B102; A49-B103; A49-B104; A49-B105; A49-B106; A49-B107; A49-B108; A49-B109; A49-B110; A49-B111; A49-B112; A49-B113;

[1590] A50-B1; A50-B2; A50-B3; A50-B4; A50-B5; A50-B6; A50-B7; A50-B8; A50-B9; A50-B10; A50-B11; A50-B12; A50-B13; A50-B14; A50-B15; A50-B16; A50-B17; A50-B18; A50-B19; A50-B20; A50-B21; A50-B22; A50-B23; A50-B24; A50-B25; A50-B26; A50-B27; A50-B28; A50-B29; A50-B30; A50-B31; A50-B32; A50-B33; A50-B34; A50-B35; A50-B36; A50-B37; A50-B38; A50-B39; A50-B40; A50-B41; A50-B42; A50-B43; A50-B44; A50-B45; A50-B46; A50-B47; A50-B48; A50-B49; A50-B50; A50-B51; A50-B52; A50-B53; A50-B54; A50-B55; A50-B56; A50-B57; A50-B58; A50-B59; A50-B60; A50-B61; A50-B62; A50-B63; A50-B64; A50-B65; A50-B66; A50-B67; A50-B68; A50-B69; A50-B70; A50-B71; A50-B72; A50-B73; A50-B74; A50-B75; A50-B76; A50-B77; A50-B78; A50-B79; A50-B80; A50-B81; A50-B82; A50-B83; A50-B84; A50-B85; A50-B86; A50-B87; A50-B88; A50-B89; A50-B90; A50-B91; A50-B92; A50-B93; A50-B94; A50-B95; A50-B96; A50-B97; A50-B98; A50-B99; A50-B100; A50-B101; A50-B102; A50-B103; A50-B104; A50-B105; A50-B106; A50-B107; A50-B108; A50-B109; A50-B110; A50-B111; A50-B112; A50-B113;

[1591] A51-B1; A51-B2; A51-B3; A51-B4; A51-B5; A51-B6; A51-B7; A51-B8; A51-B9; A51-B10; A51-B11; A51-B12; A51-B13; A51-B14; A51-B15; A51-B16; A51-B17; A51-B18; A51-B19; A51-B20; A51-B21; A51-B22; A51-B23; A51-B24; A51-B25; A51-B26; A51-B27; A51-B28; A51-B29; A51-B30; A51-B31; A51-B32; A51-B33; A51-B34; A51-B35; A51-B36; A51-B37; A51-B38; A51-B39; A51-B40; A51-B41; A51-B42; A51-B43; A51-B44; A51-B45; A51-B46; A51-B47; A51-B48; A51-B49; A51-B50; A51-B51; A51-B52; A51-B53; A51-B54; A51-B55; A51-B56; A51-B57; A51-B58; A51-B59; A51-B60; A51-B61; A51-B62; A51-B63; A51-B64; A51-B65; A51-B66; A51-B67; A51-B68; A51-B69; A51-B70; A51-B71; A51-B72; A51-B73; A51-B74; A51-B75; A51-B76; A51-B77; A51-B78; A51-B79; A51-B80; A51-B81; A51-B82; A51-B83; A51-B84; A51-B85; A51-B86; A51-B87; A51-B88; A51-B89; A51-B90; A51-B91; A51-B92; A51-B93; A51-B94; A51-B95; A51-B96; A51-B97; A51-B98; A51-B99; A51-B100; A51-B101; A51-B102; A51-B103; A51-B104; A51-B105; A51-B106; A51-B107; A51-B108; A51-B109; A51-B110; A51-B111; A51-B112; A51-B113;

[1592] A52-B1; A52-B2; A52-B3; A52-B4; A52-B5; A52-B6; A52-B7; A52-B8; A52-B9; A52-B10; A52-B11; A52-B12; A52-B13; A52-B14; A52-B15; A52-B16; A52-B17; A52-B18; A52-B19; A52-B20; A52-B21; A52-B22; A52-B23; A52-B24; A52-B25; A52-B26; A52-B27; A52-B28; A52-B29; A52-B30; A52-B31; A52-B32; A52-B33; A52-B34; A52-B35; A52-B36; A52-B37; A52-B38; A52-B39; A52-B40; A52-B41; A52-B42; A52-B43; A52-B44; A52-B45; A52-B46; A52-B47; A52-B48; A52-B49; A52-B50; A52-B51; A52-B52; A52-B53; A52-B54; A52-B55; A52-B56; A52-B57; A52-B58; A52-B59; A52-B60; A52-B61; A52-B62; A52-B63; A52-B64; A52-B65; A52-B66; A52-B67; A52-B68; A52-B69; A52-B70; A52-B71; A52-B72; A52-B73; A52-B74; A52-B75; A52-B76; A52-B77; A52-B78; A52-B79; A52-B80; A52-B81; A52-B82; A52-B83; A52-B84; A52-B85; A52-B86; A52-B87; A52-B88; A52-B89; A52-B90; A52-B91; A52-B92; A52-B93; A52-B94; A52-B95; A52-B96; A52-B97; A52-B98; A52-B99; A52-B100; A52-B101; A52-B102; A52-B103; A52-B104; A52-B105; A52-B106; A52-B107; A52-B108; A52-B109; A52-B110; A52-B111; A52-B112; A52-B113;

[1593] A53-B1; A53-B2; A53-B3; A53-B4; A53-B5; A53-B6; A53-B7; A53-B8; A53-B9; A53-B10; A53-B11; A53-B12; A53-B13; A53-B14; A53-B15; A53-B16; A53-B17; A53-B18; A53-B19; A53-B20; A53-B21; A53-B22; A53-B23; A53-B24; A53-B25; A53-B26; A53-B27; A53-B28; A53-B29; A53-B30; A53-B31; A53-B32; A53-B33; A53-B34; A53-B35; A53-B36; A53-B37; A53-B38; A53-B39; A53-B40; A53-B41; A53-B42; A53-B43; A53-B44; A53-B45; A53-B46; A53-B47; A53-B48; A53-B49; A53-B50; A53-B51; A53-B52; A53-B53; A53-B54; A53-B55; A53-B56; A53-B57; A53-B58; A53-B59; A53-B60; A53-B61; A53-B62; A53-B63; A53-B64; A53-B65; A53-B66; A53-B67; A53-B68; A53-B69; A53-B70; A53-B71; A53-B72; A53-B73; A53-B74; A53-B75; A53-B76; A53-B77; A53-B78; A53-B79; A53-B80; A53-B81; A53-B82; A53-B83; A53-B84; A53-B85; A53-B86; A53-B87; A53-B88; A53-B89; A53-B90; A53-B91; A53-B92; A53-B93; A53-B94; A53-B95; A53-B96; A53-B97; A53-B98; A53-B99; A53-B100; A53-B101; A53-B102; A53-B103; A53-B104; A53-B105; A53-B106; A53-B107; A53-B108; A53-B109; A53-B110; A53-B111; A53-B112; A53-B113;

[1594] A54-B1; A54-B2; A54-B3; A54-B4; A54-B5; A54-B6; A54-B7; A54-B8; A54-B9; A54-B10; A54-B11; A54-B12; A54-B13; A54-B14; A54-B15; A54-B16; A54-B17; A54-B18; A54-B19; A54-B20; A54-B21; A54-B22; A54-B23; A54-B24; A54-B25; A54-B26; A54-B27; A54-B28; A54-B29; A54-B30; A54-B31; A54-B32; A54-B33; A54-B34; A54-B35; A54-B36; A54-B37; A54-B38; A54-B39; A54-B40; A54-B41; A54-B42; A54-B43; A54-B44; A54-B45; A54-B46; A54-B47; A54-B48; A54-B49; A54-B50; A54-B51; A54-B52; A54-B53; A54-B54; A54-B55; A54-B56; A54-B57; A54-B58; A54-B59; A54-B60; A54-B61; A54-B62; A54-B63; A54-B64; A54-B65; A54-B66; A54-B67; A54-B68; A54-B69; A54-B70; A54-B71; A54-B72; A54-B73; A54-B74; A54-B75; A54-B76; A54-B77; A54-B78; A54-B79; A54-B80; A54-B81; A54-B82; A54-B83; A54-B84; A54-B85; A54-B86; A54-B87; A54-B88; A54-B89; A54-B90; A54-B91; A54-B92; A54-B93; A54-B94; A54-B95; A54-B96; A54-B97; A54-B98; A54-B99; A54-B100; A54-B101; A54-B102; A54-B103; A54-B104; A54-B105; A54-B106; A54-B107; A54-B108; A54-B109; A54-B110; A54-B111; A54-B112; A54-B113;

[1595] A55-B1; A55-B2; A55-B3; A55-B4; A55-B5; A55-B6; A55-B7; A55-B8; A55-B9; A55-B10; A55-B11; A55-B12; A55-B13; A55-B14; A55-B15; A55-B16; A55-B17; A55-B18; A55-B19; A55-B20; A55-B21; A55-B22; A55-B23; A55-B24; A55-B25; A55-B26; A55-B27; A55-B28; A55-B29; A55-B30; A55-B31; A55-B32; A55-B33; A55-B34; A55-B35; A55-B36; A55-B37; A55-B38; A55-B39; A55-B40; A55-B41; A55-B42; A55-B43; A55-B44; A55-B45; A55-B46; A55-B47; A55-B48; A55-B49; A55-B50; A55-B51; A55-B52; A55-B53; A55-B54; A55-B55; A55-B56; A55-B57; A55-B58; A55-B59; A55-B60; A55-B61; A55-B62; A55-B63; A55-B64; A55-B65; A55-B66; A55-B67; A55-B68; A55-B69; A55-B70; A55-B71; A55-B72; A55-B73; A55-B74; A55-B75; A55-B76; A55-B77; A55-B78; A55-B79; A55-B80; A55-B81; A55-B82; A55-B83; A55-B84; A55-B85; A55-B86; A55-B87; A55-B88; A55-B89; A55-B90; A55-B91; A55-B92; A55-B93; A55-B94; A55-B95; A55-B96; A55-B97; A55-B98; A55-B99; A55-B100; A55-B101; A55-B102; A55-B103; A55-B104; A55-B105; A55-B106; A55-B107; A55-B108; A55-B109; A55-B110; A55-B111; A55-B112; A55-B113;

[1596] A56-B1; A56-B2; A56-B3; A56-B4; A56-B5; A56-B6; A56-B7; A56-B8; A56-B9; A56-B10; A56-B11; A56-B12; A56-B13; A56-B14; A56-B15; A56-B16; A56-B17; A56-B18; A56-B19; A56-B20; A56-B21; A56-B22; A56-B23; A56-B24; A56-B25; A56-B26; A56-B27; A56-B28; A56-B29; A56-B30; A56-B31; A56-B32; A56-B33; A56-B34; A56-B35; A56-B36; A56-B37; A56-B38; A56-B39; A56-B40; A56-B41; A56-B42; A56-B43; A56-B44; A56-B45; A56-B46; A56-B47; A56-B48; A56-B49; A56-B50; A56-B51; A56-B52; A56-B53; A56-B54; A56-B55; A56-B56; A56-B57; A56-B58; A56-B59; A56-B60; A56-B61; A56-B62; A56-B63; A56-B64; A56-B65; A56-B66; A56-B67; A56-B68; A56-B69; A56-B70; A56-B71; A56-B72; A56-B73; A56-B74; A56-B75; A56-B76; A56-B77; A56-B78; A56-B79; A56-B80; A56-B81; A56-B82; A56-B83; A56-B84; A56-B85; A56-B86; A56-B87; A56-B88; A56-B89; A56-B90; A56-B91; A56-B92; A56-B93; A56-B94; A56-B95; A56-B96; A56-B97; A56-B98; A56-B99; A56-B100; A56-B101; A56-B102; A56-B103; A56-B104; A56-B105; A56-B106; A56-B107; A56-B108; A56-B109; A56-B110; A56-B111; A56-B112; A56-B113;

[1597] A57-B1; A57-B2; A57-B3; A57-B4; A57-B5; A57-B6; A57-B7; A57-B8; A57-B9; A57-B10; A57-B11; A57-B12; A57-B13; A57-B14; A57-B15; A57-B16; A57-B17; A57-B18; A57-B19; A57-B20; A57-B21; A57-B22; A57-B23; A57-B24; A57-B25; A57-B26; A57-B27; A57-B28; A57-B29; A57-B30; A57-B31; A57-B32; A57-B33; A57-B34; A57-B35; A57-B36; A57-B37; A57-B38; A57-B39; A57-B40; A57-B41; A57-B42; A57-B43; A57-B44; A57-B45; A57-B46; A57-B47; A57-B48; A57-B49; A57-B50; A57-B51; A57-B52; A57-B53; A57-B54; A57-B55; A57-B56; A57-B57; A57-B58; A57-B59; A57-B60; A57-B61; A57-B62; A57-B63; A57-B64; A57-B65; A57-B66; A57-B67; A57-B68; A57-B69; A57-B70; A57-B71; A57-B72; A57-B73; A57-B74; A57-B75; A57-B76; A57-B77; A57-B78; A57-B79; A57-B80; A57-B81; A57-B82; A57-B83; A57-B84; A57-B85; A57-B86; A57-B87; A57-B88; A57-B89; A57-B90; A57-B91; A57-B92; A57-B93; A57-B94; A57-B95; A57-B96; A57-B97; A57-B98; A57-B99; A57-B100; A57-B101; A57-B102; A57-B103; A57-B104; A57-B105; A57-B106; A57-B107; A57-B108; A57-B109; A57-B110; A57-B111; A57-B112; A57-B113;

[1598] A58-B1; A58-B2; A58-B3; A58-B4; A58-B5; A58-B6; A58-B7; A58-B8; A58-B9; A58-B10; A58-B11; A58-B12; A58-B13; A58-B14; A58-B15; A58-B16; A58-B17; A58-B18; A58-B19; A58-B20; A58-B21; A58-B22; A58-B23; A58-B24; A58-B25; A58-B26; A58-B27; A58-B28; A58-B29; A58-B30; A58-B31; A58-B32; A58-B33; A58-B34; A58-B35; A58-B36; A58-B37; A58-B38; A58-B39; A58-B40; A58-B41; A58-B42; A58-B43; A58-B44; A58-B45; A58-B46; A58-B47; A58-B48; A58-B49; A58-B50; A58-B51; A58-B52; A58-B53; A58-B54; A58-B55; A58-B56; A58-B57; A58-B58; A58-B59; A58-B60; A58-B61; A58-B62; A58-B63; A58-B64; A58-B65; A58-B66; A58-B67; A58-B68; A58-B69; A58-B70; A58-B71; A58-B72; A58-B73; A58-B74; A58-B75; A58-B76; A58-B77; A58-B78; A58-B79; A58-B80; A58-B81; A58-B82; A58-B83; A58-B84; A58-B85; A58-B86; A58-B87; A58-B88; A58-B89; A58-B90; A58-B91; A58-B92; A58-B93; A58-B94; A58-B95; A58-B96; A58-B97; A58-B98; A58-B99; A58-B100; A58-B101; A58-B102; A58-B103; A58-B104; A58-B105; A58-B106; A58-B107; A58-B108; A58-B109; A58-B110; A58-B111; A58-B112; A58-B113;

[1599] A59-B1; A59-B2; A59-B3; A59-B4; A59-B5; A59-B6; A59-B7; A59-B8; A59-B9; A59-B10; A59-B11; A59-B12; A59-B13; A59-B14; A59-B15; A59-B16; A59-B17; A59-B18; A59-B19; A59-B20; A59-B21; A59-B22; A59-B23; A59-B24; A59-B25; A59-B26; A59-B27; A59-B28; A59-B29; A59-B30; A59-B31; A59-B32; A59-B33; A59-B34; A59-B35; A59-B36; A59-B37; A59-B38; A59-B39; A59-B40; A59-B41; A59-B42; A59-B43; A59-B44; A59-B45; A59-B46; A59-B47; A59-B48; A59-B49; A59-B50; A59-B51; A59-B52; A59-B53; A59-B54; A59-B55; A59-B56; A59-B57; A59-B58; A59-B59; A59-B60; A59-B61; A59-B62; A59-B63; A59-B64; A59-B65; A59-B66; A59-B67; A59-B68; A59-B69; A59-B70; A59-B71; A59-B72; A59-B73; A59-B74; A59-B75; A59-B76; A59-B77; A59-B78; A59-B79; A59-B80; A59-B81; A59-B82; A59-B83; A59-B84; A59-B85; A59-B86; A59-B87; A59-B88; A59-B89; A59-B90; A59-B91; A59-B92; A59-B93; A59-B94; A59-B95; A59-B96; A59-B97; A59-B98; A59-B99; A59-B100; A59-B101; A59-B102; A59-B103; A59-B104; A59-B105; A59-B106; A59-B107; A59-B108; A59-B109; A59-B110; A59-B111; A59-B112; A59-B113;

[1600] A60-B1; A60-B2; A60-B3; A60-B4; A60-B5; A60-B6; A60-B7; A60-B8; A60-B9; A60-B10; A60-B11; A60-B12; A60-B13; A60-B14; A60-B15; A60-B16; A60-B17; A60-B18; A60-B19; A60-B20; A60-B21; A60-B22; A60-B23; A60-B24; A60-B25; A60-B26; A60-B27; A60-B28; A60-B29; A60-B30; A60-B31; A60-B32; A60-B33; A60-B34; A60-B35; A60-B36; A60-B37; A60-B38; A60-B39; A60-B40; A60-B41; A60-B42; A60-B43; A60-B44; A60-B45; A60-B46; A60-B47; A60-B48; A60-B49; A60-B50; A60-B51; A60-B52; A60-B53; A60-B54; A60-B55; A60-B56; A60-B57; A60-B58; A60-B59; A60-B60; A60-B61; A60-B62; A60-B63; A60-B64; A60-B65; A60-B66; A60-B67; A60-B68; A60-B69; A60-B70; A60-B71; A60-B72; A60-B73; A60-B74; A60-B75; A60-B76; A60-B77; A60-B78; A60-B79; A60-B80; A60-B81; A60-B82; A60-B83; A60-B84; A60-B85; A60-B86; A60-B87; A60-B88; A60-B89; A60-B90; A60-B91; A60-B92; A60-B93; A60-B94; A60-B95; A60-B96; A60-B97; A60-B98; A60-B99; A60-B100; A60-B101; A60-B102; A60-B103; A60-B104; A60-B105; A60-B106; A60-B107; A60-B108; A60-B109; A60-B110; A60-B111; A60-B112; A60-B113;

[1601] A61-B1; A61-B2; A61-B3; A61-B4; A61-B5; A61-B6; A61-B7; A61-B8; A61-B9; A61-B10; A61-B11; A61-B12; A61-B13; A61-B14; A61-B15; A61-B16; A61-B17; A61-B18; A61-B19; A61-B20; A61-B21; A61-B22; A61-B23; A61-B24; A61-B25; A61-B26; A61-B27; A61-B28; A61-B29; A61-B30; A61-B31; A61-B32; A61-B33; A61-B34; A61-B35; A61-B36; A61-B37; A61-B38; A61-B39; A61-B40; A61-B41; A61-B42; A61-B43; A61-B44; A61-B45; A61-B46; A61-B47; A61-B48; A61-B49; A61-B50; A61-B51; A61-B52; A61-B53; A61-B54; A61-B55; A61-B56; A61-B57; A61-B58; A61-B59; A61-B60; A61-B61; A61-B62; A61-B63; A61-B64; A61-B65; A61-B66; A61-B67; A61-B68; A61-B69; A61-B70; A61-B71; A61-B72; A61-B73; A61-B74; A61-B75; A61-B76; A61-B77; A61-B78; A61-B79; A61-B80; A61-B81; A61-B82; A61-B83; A61-B84; A61-B85; A61-B86; A61-B87; A61-B88; A61-B89; A61-B90; A61-B91; A61-B92; A61-B93; A61-B94; A61-B95; A61-B96; A61-B97; A61-B98; A61-B99; A61-B100; A61-B101; A61-B102; A61-B103; A61-B104; A61-B105; A61-B106; A61-B107; A61-B108; A61-B109; A61-B110; A61-B111; A61-B112; A61-B113;

[1602] A62-B1; A62-B2; A62-B3; A62-B4; A62-B5; A62-B6; A62-B7; A62-B8; A62-B9; A62-B10; A62-B11; A62-B12; A62-B13; A62-B14; A62-B15; A62-B16; A62-B17; A62-B18; A62-B19; A62-B20; A62-B21; A62-B22; A62-B23; A62-B24; A62-B25; A62-B26; A62-B27; A62-B28; A62-B29; A62-B30; A62-B31; A62-B32; A62-B33; A62-B34; A62-B35; A62-B36; A62-B37; A62-B38; A62-B39; A62-B40; A62-B41; A62-B42; A62-B43; A62-B44; A62-B45; A62-B46; A62-B47; A62-B48; A62-B49; A62-B50; A62-B51; A62-B52; A62-B53; A62-B54; A62-B55; A62-B56; A62-B57; A62-B58; A62-B59; A62-B60; A62-B61; A62-B62; A62-B63; A62-B64; A62-B65; A62-B66; A62-B67; A62-B68; A62-B69; A62-B70; A62-B71; A62-B72; A62-B73; A62-B74; A62-B75; A62-B76; A62-B77; A62-B78; A62-B79; A62-B80; A62-B81; A62-B82; A62-B83; A62-B84; A62-B85; A62-B86; A62-B87; A62-B88; A62-B89; A62-B90; A62-B91; A62-B92; A62-B93; A62-B94; A62-B95; A62-B96; A62-B97; A62-B98; A62-B99; A62-B100; A62-B101; A62-B102; A62-B103; A62-B104; A62-B105; A62-B106; A62-B107; A62-B108; A62-B109; A62-B110; A62-B111; A62-B112; A62-B113;

[1603] A63-B1; A63-B2; A63-B3; A63-B4; A63-B5; A63-B6; A63-B7; A63-B8; A63-B9; A63-B10; A63-B11; A63-B12; A63-B13; A63-B14; A63-B15; A63-B16; A63-B17; A63-B18; A63-B19; A63-B20; A63-B21; A63-B22; A63-B23; A63-B24; A63-B25; A63-B26; A63-B27; A63-B28; A63-B29; A63-B30; A63-B31; A63-B32; A63-B33; A63-B34; A63-B35; A63-B36; A63-B37; A63-B38; A63-B39; A63-B40; A63-B41; A63-B42; A63-B43; A63-B44; A63-B45; A63-B46; A63-B47; A63-B48; A63-B49; A63-B50; A63-B51; A63-B52; A63-B53; A63-B54; A63-B55; A63-B56; A63-B57; A63-B58; A63-B59; A63-B60; A63-B61; A63-B62; A63-B63; A63-B64; A63-B65; A63-B66; A63-B67; A63-B68; A63-B69; A63-B70; A63-B71; A63-B72; A63-B73; A63-B74; A63-B75; A63-B76; A63-B77; A63-B78; A63-B79; A63-B80; A63-B81; A63-B82; A63-B83; A63-B84; A63-B85; A63-B86; A63-B87; A63-B88; A63-B89; A63-B90; A63-B91; A63-B92; A63-B93; A63-B94; A63-B95; A63-B96; A63-B97; A63-B98; A63-B99; A63-B100; A63-B101; A63-B102; A63-B103; A63-B104; A63-B105; A63-B106; A63-B107; A63-B108; A63-B109; A63-B110; A63-B111; A63-B112; A63-B113;

[1604] A64-B1; A64-B2; A64-B3; A64-B4; A64-B5; A64-B6; A64-B7; A64-B8; A64-B9; A64-B10; A64-B11; A64-B12; A64-B13; A64-B14; A64-B15; A64-B16; A64-B17; A64-B18; A64-B19; A64-B20; A64-B21; A64-B22; A64-B23; A64-B24; A64-B25; A64-B26; A64-B27; A64-B28; A64-B29; A64-B30; A64-B31; A64-B32; A64-B33; A64-B34; A64-B35; A64-B36; A64-B37; A64-B38; A64-B39; A64-B40; A64-B41; A64-B42; A64-B43; A64-B44; A64-B45; A64-B46; A64-B47; A64-B48; A64-B49; A64-B50; A64-B51; A64-B52; A64-B53; A64-B54; A64-B55; A64-B56; A64-B57; A64-B58; A64-B59; A64-B60; A64-B61; A64-B62; A64-B63; A64-B64; A64-B65; A64-B66; A64-B67; A64-B68; A64-B69; A64-B70; A64-B71; A64-B72; A64-B73; A64-B74; A64-B75; A64-B76; A64-B77; A64-B78; A64-B79; A64-B80; A64-B81; A64-B82; A64-B83; A64-B84; A64-B85; A64-B86; A64-B87; A64-B88; A64-B89; A64-B90; A64-B91; A64-B92; A64-B93; A64-B94; A64-B95; A64-B96; A64-B97; A64-B98; A64-B99; A64-B100; A64-B101; A64-B102; A64-B103; A64-B104; A64-B105; A64-B106; A64-B107; A64-B108; A64-B109; A64-B110; A64-B111; A64-B112; A64-B113;

[1605] A65-B1; A65-B2; A65-B3; A65-B4; A65-B5; A65-B6; A65-B7; A65-B8; A65-B9; A65-B10; A65-B11; A65-B12; A65-B13; A65-B14; A65-B15; A65-B16; A65-B17; A65-B18; A65-B19; A65-B20; A65-B21; A65-B22; A65-B23; A65-B24; A65-B25; A65-B26; A65-B27; A65-B28; A65-B29; A65-B30; A65-B31; A65-B32; A65-B33; A65-B34; A65-B35; A65-B36; A65-B37; A65-B38; A65-B39; A65-B40; A65-B41; A65-B42; A65-B43; A65-B44; A65-B45; A65-B46; A65-B47; A65-B48; A65-B49; A65-B50; A65-B51; A65-B52; A65-B53; A65-B54; A65-B55; A65-B56; A65-B57; A65-B58; A65-B59; A65-B60; A65-B61; A65-B62; A65-B63; A65-B64; A65-B65; A65-B66; A65-B67; A65-B68; A65-B69; A65-B70; A65-B71; A65-B72; A65-B73; A65-B74; A65-B75; A65-B76; A65-B77; A65-B78; A65-B79; A65-B80; A65-B81; A65-B82; A65-B83; A65-B84; A65-B85; A65-B86; A65-B87; A65-B88; A65-B89; A65-B90; A65-B91; A65-B92; A65-B93; A65-B94; A65-B95; A65-B96; A65-B97; A65-B98; A65-B99; A65-B100; A65-B101; A65-B102; A65-B103; A65-B104; A65-B105; A65-B106; A65-B107; A65-B108; A65-B109; A65-B110; A65-B111; A65-B112; A65-B113;

[1606] A66-B1; A66-B2; A66-B3; A66-B4; A66-B5; A66-B6; A66-B7; A66-B8; A66-B9; A66-B10; A66-B11; A66-B12; A66-B13; A66-B14; A66-B15; A66-B16; A66-B17; A66-B18; A66-B19; A66-B20; A66-B21; A66-B22; A66-B23; A66-B24; A66-B25; A66-B26; A66-B27; A66-B28; A66-B29; A66-B30; A66-B31; A66-B32; A66-B33; A66-B34; A66-B35; A66-B36; A66-B37; A66-B38; A66-B39; A66-B40; A66-B41; A66-B42; A66-B43; A66-B44; A66-B45; A66-B46; A66-B47; A66-B48; A66-B49; A66-B50; A66-B51; A66-B52; A66-B53; A66-B54; A66-B55; A66-B56; A66-B57; A66-B58; A66-B59; A66-B60; A66-B61; A66-B62; A66-B63; A66-B64; A66-B65; A66-B66; A66-B67; A66-B68; A66-B69; A66-B70; A66-B71; A66-B72; A66-B73; A66-B74; A66-B75; A66-B76; A66-B77; A66-B78; A66-B79; A66-B80; A66-B81; A66-B82; A66-B83; A66-B84; A66-B85; A66-B86; A66-B87; A66-B88; A66-B89; A66-B90; A66-B91; A66-B92; A66-B93; A66-B94; A66-B95; A66-B96; A66-B97; A66-B98; A66-B99; A66-B100; A66-B101; A66-B102; A66-B103; A66-B104; A66-B105; A66-B106; A66-B107; A66-B108; A66-B109; A66-B110; A66-B111; A66-B112; A66-B113;

[1607] A67-B1; A67-B2; A67-B3; A67-B4; A67-B5; A67-B6; A67-B7; A67-B8; A67-B9; A67-B10; A67-B11; A67-B12; A67-B13; A67-B14; A67-B15; A67-B16; A67-B17; A67-B18; A67-B19; A67-B20; A67-B21; A67-B22; A67-B23; A67-B24; A67-B25; A67-B26; A67-B27; A67-B28; A67-B29; A67-B30; A67-B31; A67-B32; A67-B33; A67-B34; A67-B35; A67-B36; A67-B37; A67-B38; A67-B39; A67-B40; A67-B41; A67-B42; A67-B43; A67-B44; A67-B45; A67-B46; A67-B47; A67-B48; A67-B49; A67-B50; A67-B51; A67-B52; A67-B53; A67-B54; A67-B55; A67-B56; A67-B57; A67-B58; A67-B59; A67-B60; A67-B61; A67-B62; A67-B63; A67-B64; A67-B65; A67-B66; A67-B67; A67-B68; A67-B69; A67-B70; A67-B71; A67-B72; A67-B73; A67-B74; A67-B75; A67-B76; A67-B77; A67-B78; A67-B79; A67-B80; A67-B81; A67-B82; A67-B83; A67-B84; A67-B85; A67-B86; A67-B87; A67-B88; A67-B89; A67-B90; A67-B91; A67-B92; A67-B93; A67-B94; A67-B95; A67-B96; A67-B97; A67-B98; A67-B99; A67-B100; A67-B101; A67-B102; A67-B103; A67-B104; A67-B105; A67-B106; A67-B107; A67-B108; A67-B109; A67-B110; A67-B111; A67-B112; A67-B113;

[1608] A68-B1; A68-B2; A68-B3; A68-B4; A68-B5; A68-B6; A68-B7; A68-B8; A68-B9; A68-B10; A68-B11; A68-B12; A68-B13; A68-B14; A68-B15; A68-B16; A68-B17; A68-B18; A68-B19; A68-B20; A68-B21; A68-B22; A68-B23; A68-B24; A68-B25; A68-B26; A68-B27; A68-B28; A68-B29; A68-B30; A68-B31; A68-B32; A68-B33; A68-B34; A68-B35; A68-B36; A68-B37; A68-B38; A68-B39; A68-B40; A68-B41; A68-B42; A68-B43; A68-B44; A68-B45; A68-B46; A68-B47; A68-B48; A68-B49; A68-B50; A68-B51; A68-B52; A68-B53; A68-B54; A68-B55; A68-B56; A68-B57; A68-B58; A68-B59; A68-B60; A68-B61; A68-B62; A68-B63; A68-B64; A68-B65; A68-B66; A68-B67; A68-B68; A68-B69; A68-B70; A68-B71; A68-B72; A68-B73; A68-B74; A68-B75; A68-B76; A68-B77; A68-B78; A68-B79; A68-B80; A68-B81; A68-B82; A68-B83; A68-B84; A68-B85; A68-B86; A68-B87; A68-B88; A68-B89; A68-B90; A68-B91; A68-B92; A68-B93; A68-B94; A68-B95; A68-B96; A68-B97; A68-B98; A68-B99; A68-B100; A68-B101; A68-B102; A68-B103; A68-B104; A68-B105; A68-B106; A68-B107; A68-B108; A68-B109; A68-B110; A68-B111; A68-B112; A68-B113;

[1609] A69-B1; A69-B2; A69-B3; A69-B4; A69-B5; A69-B6; A69-B7; A69-B8; A69-B9; A69-B10; A69-B11; A69-B12; A69-B13; A69-B14; A69-B15; A69-B16; A69-B17; A69-B18; A69-B19; A69-B20; A69-B21; A69-B22; A69-B23; A69-B24; A69-B25; A69-B26; A69-B27; A69-B28; A69-B29; A69-B30; A69-B31; A69-B32; A69-B33; A69-B34; A69-B35; A69-B36; A69-B37; A69-B38; A69-B39; A69-B40; A69-B41; A69-B42; A69-B43; A69-B44; A69-B45; A69-B46; A69-B47; A69-B48; A69-B49; A69-B50; A69-B51; A69-B52; A69-B53; A69-B54; A69-B55; A69-B56; A69-B57; A69-B58; A69-B59; A69-B60; A69-B61; A69-B62; A69-B63; A69-B64; A69-B65; A69-B66; A69-B67; A69-B68; A69-B69; A69-B70; A69-B71; A69-B72; A69-B73; A69-B74; A69-B75; A69-B76; A69-B77; A69-B78; A69-B79; A69-B80; A69-B81; A69-B82; A69-B83; A69-B84; A69-B85; A69-B86; A69-B87; A69-B88; A69-B89; A69-B90; A69-B91; A69-B92; A69-B93; A69-B94; A69-B95; A69-B96; A69-B97; A69-B98; A69-B99; A69-B100; A69-B101; A69-B102; A69-B103; A69-B104; A69-B105; A69-B106; A69-B107; A69-B108; A69-B109; A69-B110; A69-B111; A69-B112; A69-B113;

[1610] A70-B1; A70-B2; A70-B3; A70-B4; A70-B5; A70-B6; A70-B7; A70-B8; A70-B9; A70-B10; A70-B11; A70-B12; A70-B13; A70-B14; A70-B15; A70-B16; A70-B17; A70-B18; A70-B19; A70-B20; A70-B21; A70-B22; A70-B23; A70-B24; A70-B25; A70-B26; A70-B27; A70-B28; A70-B29; A70-B30; A70-B31; A70-B32; A70-B33; A70-B34; A70-B35; A70-B36; A70-B37; A70-B38; A70-B39; A70-B40; A70-B41; A70-B42; A70-B43; A70-B44; A70-B45; A70-B46; A70-B47; A70-B48; A70-B49; A70-B50; A70-B51; A70-B52; A70-B53; A70-B54; A70-B55; A70-B56; A70-B57; A70-B58; A70-B59; A70-B60; A70-B61; A70-B62; A70-B63; A70-B64; A70-B65; A70-B66; A70-B67; A70-B68; A70-B69; A70-B70; A70-B71; A70-B72; A70-B73; A70-B74; A70-B75; A70-B76; A70-B77; A70-B78; A70-B79; A70-B80; A70-B81; A70-B82; A70-B83; A70-B84; A70-B85; A70-B86; A70-B87; A70-B88; A70-B89; A70-B90; A70-B91; A70-B92; A70-B93; A70-B94; A70-B95; A70-B96; A70-B97; A70-B98; A70-B99; A70-B100; A70-B101; A70-B102; A70-B103; A70-B104; A70-B105; A70-B106; A70-B107; A70-B108; A70-B109; A70-B110; A70-B111; A70-B112; A70-B113;

[1611] A71-B1; A71-B2; A71-B3; A71-B4; A71-B5; A71-B6; A71-B7; A71-B8; A71-B9; A71-B10; A71-B11; A71-B12; A71-B13; A71-B14; A71-B15; A71-B16; A71-B17; A71-B18; A71-B19; A71-B20; A71-B21; A71-B22; A71-B23; A71-B24; A71-B25; A71-B26; A71-B27; A71-B28; A71-B29; A71-B30; A71-B31; A71-B32; A71-B33; A71-B34; A71-B35; A71-B36; A71-B37; A71-B38; A71-B39; A71-B40; A71-B41; A71-B42; A71-B43; A71-B44; A71-B45; A71-B46; A71-B47; A71-B48; A71-B49; A71-B50; A71-B51; A71-B52; A71-B53; A71-B54; A71-B55; A71-B56; A71-B57; A71-B58; A71-B59; A71-B60; A71-B61; A71-B62; A71-B63; A71-B64; A71-B65; A71-B66; A71-B67; A71-B68; A71-B69; A71-B70; A71-B71; A71-B72; A71-B73; A71-B74; A71-B75; A71-B76; A71-B77; A71-B78; A71-B79; A71-B80; A71-B81; A71-B82; A71-B83; A71-B84; A71-B85; A71-B86; A71-B87; A71-B88; A71-B89; A71-B90; A71-B91; A71-B92; A71-B93; A71-B94; A71-B95; A71-B96; A71-B97; A71-B98; A71-B99; A71-B100; A71-B101; A71-B102; A71-B103; A71-B104; A71-B105; A71-B106; A71-B107; A71-B108; A71-B109; A71-B110; A71-B111; A71-B112; A71-B113;

[1612] A72-B1; A72-B2; A72-B3; A72-B4; A72-B5; A72-B6; A72-B7; A72-B8; A72-B9; A72-B10; A72-B11; A72-B12; A72-B13; A72-B14; A72-B15; A72-B16; A72-B17; A72-B18; A72-B19; A72-B20; A72-B21; A72-B22; A72-B23; A72-B24; A72-B25; A72-B26; A72-B27; A72-B28; A72-B29; A72-B30; A72-B31; A72-B32; A72-B33; A72-B34; A72-B35; A72-B36; A72-B37; A72-B38; A72-B39; A72-B40; A72-B41; A72-B42; A72-B43; A72-B44; A72-B45; A72-B46; A72-B47; A72-B48; A72-B49; A72-B50; A72-B51; A72-B52; A72-B53; A72-B54; A72-B55; A72-B56; A72-B57; A72-B58; A72-B59; A72-B60; A72-B61; A72-B62; A72-B63; A72-B64; A72-B65; A72-B66; A72-B67; A72-B68; A72-B69; A72-B70; A72-B71; A72-B72; A72-B73; A72-B74; A72-B75; A72-B76; A72-B77; A72-B78; A72-B79; A72-B80; A72-B81; A72-B82; A72-B83; A72-B84; A72-B85; A72-B86; A72-B87; A72-B88; A72-B89; A72-B90; A72-B91; A72-B92; A72-B93; A72-B94; A72-B95; A72-B96; A72-B97; A72-B98; A72-B99; A72-B100; A72-B101; A72-B102; A72-B103; A72-B104; A72-B105; A72-B106; A72-B107; A72-B108; A72-B109; A72-B110; A72-B111; A72-B112; A72-B113;

[1613] A73-B1; A73-B2; A73-B3; A73-B4; A73-B5; A73-B6; A73-B7; A73-B8; A73-B9; A73-B10; A73-B11; A73-B12; A73-B13; A73-B14; A73-B15; A73-B16; A73-B17; A73-B18; A73-B19; A73-B20; A73-B21; A73-B22; A73-B23; A73-B24; A73-B25; A73-B26; A73-B27; A73-B28; A73-B29; A73-B30; A73-B31; A73-B32; A73-B33; A73-B34; A73-B35; A73-B36; A73-B37; A73-B38; A73-B39; A73-B40; A73-B41; A73-B42; A73-B43; A73-B44; A73-B45; A73-B46; A73-B47; A73-B48; A73-B49; A73-B50; A73-B51; A73-B52; A73-B53; A73-B54; A73-B55; A73-B56; A73-B57; A73-B58; A73-B59; A73-B60; A73-B61; A73-B62; A73-B63; A73-B64; A73-B65; A73-B66; A73-B67; A73-B68; A73-B69; A73-B70; A73-B71; A73-B72; A73-B73; A73-B74; A73-B75; A73-B76; A73-B77; A73-B78; A73-B79; A73-B80; A73-B81; A73-B82; A73-B83; A73-B84; A73-B85; A73-B86; A73-B87; A73-B88; A73-B89; A73-B90; A73-B91; A73-B92; A73-B93; A73-B94; A73-B95; A73-B96; A73-B97; A73-B98; A73-B99; A73-B100; A73-B101; A73-B102; A73-B103; A73-B104; A73-B105; A73-B106; A73-B107; A73-B108; A73-B109; A73-B110; A73-B111; A73-B112; A73-B113;

[1614] A74-B1; A74-B2; A74-B3; A74-B4; A74-B5; A74-B6; A74-B7; A74-B8; A74-B9; A74-B10; A74-B11; A74-B12; A74-B13; A74-B14; A74-B15; A74-B16; A74-B17; A74-B18; A74-B19; A74-B20; A74-B21; A74-B22; A74-B23; A74-B24; A74-B25; A74-B26; A74-B27; A74-B28; A74-B29; A74-B30; A74-B31; A74-B32; A74-B33; A74-B34; A74-B35; A74-B36; A74-B37; A74-B38; A74-B39; A74-B40; A74-B41; A74-B42; A74-B43; A74-B44; A74-B45; A74-B46; A74-B47; A74-B48; A74-B49; A74-B50; A74-B51; A74-B52; A74-B53; A74-B54; A74-B55; A74-B56; A74-B57; A74-B58; A74-B59; A74-B60; A74-B61; A74-B62; A74-B63; A74-B64; A74-B65; A74-B66; A74-B67; A74-B68; A74-B69; A74-B70; A74-B71; A74-B72; A74-B73; A74-B74; A74-B75; A74-B76; A74-B77; A74-B78; A74-B79; A74-B80; A74-B81; A74-B82; A74-B83; A74-B84; A74-B85; A74-B86; A74-B87; A74-B88; A74-B89; A74-B90; A74-B91; A74-B92; A74-B93; A74-B94; A74-B95; A74-B96; A74-B97; A74-B98; A74-B99; A74-B100; A74-B101; A74-B102; A74-B103; A74-B104; A74-B105; A74-B106; A74-B107; A74-B108; A74-B109; A74-B110; A74-B111; A74-B112; A74-B113;

[1615] A75-B1; A75-B2; A75-B3; A75-B4; A75-B5; A75-B6; A75-B7; A75-B8; A75-B9; A75-B10; A75-B11; A75-B12; A75-B13; A75-B14; A75-B15; A75-B16; A75-B17; A75-B18; A75-B19; A75-B20; A75-B21; A75-B22; A75-B23; A75-B24; A75-B25; A75-B26; A75-B27; A75-B28; A75-B29; A75-B30; A75-B31; A75-B32; A75-B33; A75-B34; A75-B35; A75-B36; A75-B37; A75-B38; A75-B39; A75-B40; A75-B41; A75-B42; A75-B43; A75-B44; A75-B45; A75-B46; A75-B47; A75-B48; A75-B49; A75-B50; A75-B51; A75-B52; A75-B53; A75-B54; A75-B55; A75-B56; A75-B57; A75-B58; A75-B59; A75-B60; A75-B61; A75-B62; A75-B63; A75-B64; A75-B65; A75-B66; A75-B67; A75-B68; A75-B69; A75-B70; A75-B71; A75-B72; A75-B73; A75-B74; A75-B75; A75-B76; A75-B77; A75-B78; A75-B79; A75-B80; A75-B81; A75-B82; A75-B83; A75-B84; A75-B85; A75-B86; A75-B87; A75-B88; A75-B89; A75-B90; A75-B91; A75-B92; A75-B93; A75-B94; A75-B95; A75-B96; A75-B97; A75-B98; A75-B99; A75-B100; A75-B101; A75-B102; A75-B103; A75-B104; A75-B105; A75-B106; A75-B107; A75-B108; A75-B109; A75-B110; A75-B111; A75-B112; A75-B113;

[1616] A76-B1; A76-B2; A76-B3; A76-B4; A76-B5; A76-B6; A76-B7; A76-B8; A76-B9; A76-B10; A76-B11; A76-B12; A76-B13; A76-B14; A76-B15; A76-B16; A76-B17; A76-B18; A76-B19; A76-B20; A76-B21; A76-B22; A76-B23; A76-B24; A76-B25; A76-B26; A76-B27; A76-B28; A76-B29; A76-B30; A76-B31; A76-B32; A76-B33; A76-B34; A76-B35; A76-B36; A76-B37; A76-B38; A76-B39; A76-B40; A76-B41; A76-B42; A76-B43; A76-B44; A76-B45; A76-B46; A76-B47; A76-B48; A76-B49; A76-B50; A76-B51; A76-B52; A76-B53; A76-B54; A76-B55; A76-B56; A76-B57; A76-B58; A76-B59; A76-B60; A76-B61; A76-B62; A76-B63; A76-B64; A76-B65; A76-B66; A76-B67; A76-B68; A76-B69; A76-B70; A76-B71; A76-B72; A76-B73; A76-B74; A76-B75; A76-B76; A76-B77; A76-B78; A76-B79; A76-B80; A76-B81; A76-B82; A76-B83; A76-B84; A76-B85; A76-B86; A76-B87; A76-B88; A76-B89; A76-B90; A76-B91; A76-B92; A76-B93; A76-B94; A76-B95; A76-B96; A76-B97; A76-B98; A76-B99; A76-B100; A76-B101; A76-B102; A76-B103; A76-B104; A76-B105; A76-B106; A76-B107; A76-B108; A76-B109; A76-B110; A76-B111; A76-B112; A76-B113;

[1617] A77-B1; A77-B2; A77-B3; A77-B4; A77-B5; A77-B6; A77-B7; A77-B8; A77-B9; A77-B10; A77-B11; A77-B12; A77-B13; A77-B14; A77-B15; A77-B16; A77-B17; A77-B18; A77-B19; A77-B20; A77-B21; A77-B22; A77-B23; A77-B24; A77-B25; A77-B26; A77-B27; A77-B28; A77-B29; A77-B30; A77-B31; A77-B32; A77-B33; A77-B34; A77-B35; A77-B36; A77-B37; A77-B38; A77-B39; A77-B40; A77-B41; A77-B42; A77-B43; A77-B44; A77-B45; A77-B46; A77-B47; A77-B48; A77-B49; A77-B50; A77-B51; A77-B52; A77-B53; A77-B54; A77-B55; A77-B56; A77-B57; A77-B58; A77-B59; A77-B60; A77-B61; A77-B62; A77-B63; A77-B64; A77-B65; A77-B66; A77-B67; A77-B68; A77-B69; A77-B70; A77-B71; A77-B72; A77-B73; A77-B74; A77-B75; A77-B76; A77-B77; A77-B78; A77-B79; A77-B80; A77-B81; A77-B82; A77-B83; A77-B84; A77-B85; A77-B86; A77-B87; A77-B88; A77-B89; A77-B90; A77-B91; A77-B92; A77-B93; A77-B94; A77-B95; A77-B96; A77-B97; A77-B98; A77-B99; A77-B100; A77-B101; A77-B102; A77-B103; A77-B104; A77-B105; A77-B106; A77-B107; A77-B108; A77-B109; A77-B110; A77-B111; A77-B112; A77-B113;

[1618] Sub-Category IA: Amino Acid B of the Dipeptide Prodrug Element is N-Alkylated Glycine

[1619] In some embodiments, the B amino acid of the dipeptide prodrug element is N-alkylated glycine. Nonlimiting examples of dipeptide prodrug elements having N-alkylated glycine as the B amino acid are shown in the below Table.

TABLE 5

| Dipeptide Prodrug Element # | Amino Acid ‘A’ | Amino Acid ‘B’ |
|---|---|---|
| 1 | Aib | Gly(N-C1-C8alkyl) |
| 2 | d-Ala | Gly(N-C1-C8alkyl) |
| 3 | d-Lys | Gly(N-C1-C8alkyl) |
| 4 | d-Cys | Gly(N-C1-C8alkyl) |
| 5 | Aib | Gly(N-methyl) |
| 6 | d-Ala | Gly(N-methyl) |
| 7 | d-Lys | Gly(N-methyl) |
| 8 | d-Cys | Gly(N-methyl) |
| 9 | Aib | Gly(N-hexyl) |
| 10 | d-Ala | Gly(N-hexyl) |
| 11 | d-Lys | Gly(N-hexyl) |
| 12 | d-Cys | Gly(N-hexyl) |

[1620] Sub-Category IB: Amino Acid B of the Dipeptide Prodrug Element is Unsubstituted or Monosubstituted at the Beta Position

[1621] In some embodiments, the B amino acid of the dipeptide prodrug element is unsubstituted or monosubstituted at the beta position and has a relatively non-bulky side chain. Nonlimiting examples of dipeptide prodrug elements having a B amino acid that is unsubstituted or monosubstituted at the beta position and a relatively non-bulky side chain are shown in the below Table.

TABLE 6

| Dipeptide Prodrug Element # | Amino Acid ‘A’ | Amino Acid ‘B’ |
|---|---|---|
| 13 | Aib | Ala(N-C1-C8alkyl) |
| 14 | d-Ala | Ala(N-C1-C8alkyl) |
| 15 | d-Lys | Ala(N-C1-C8alkyl) |
| 16 | d-Cys | Ala(N-C1-C8alkyl) |
| 17 | Aib | Leu(N-C1-C8alkyl) |
| 18 | d-Ala | Leu(N-C1-C8alkyl) |
| 19 | d-Lys | Leu(N-C1-C8alkyl) |
| 20 | d-Cys | Leu(N-C1-C8alkyl) |
| 21 | Aib | Met(N-C1-C8alkyl) |
| 22 | d-Ala | Met(N-C1-C8alkyl) |
| 23 | d-Lys | Met(N-C1-C8alkyl) |
| 24 | d-Cys | Met(N-C1-C8alkyl) |
| 25 | Aib | Asn(N-C1-C8alkyl) |
| 26 | d-Ala | Asn(N-C1-C8alkyl) |
| 27 | d-Lys | Asn(N-C1-C8alkyl) |
| 28 | d-Cys | Asn(N-C1-C8alkyl) |
| 29 | Aib | Glu(N-C1-C8alkyl) |
| 30 | d-Ala | Glu(N-C1-C8alkyl) |
| 31 | d-Lys | Glu(N-C1-C8alkyl) |
| 32 | d-Cys | Glu(N-C1-C8alkyl) |
| 33 | Aib | Asp(N-C1-C8alkyl) |
| 34 | d-Ala | Asp(N-C1-C8alkyl) |
| 35 | d-Lys | Asp(N-C1-C8alkyl) |
| 36 | d-Cys | Asp(N-C1-C8alkyl) |
| 37 | Aib | Gln(N-C1-C8alkyl) |
| 38 | d-Ala | Gln(N-C1-C8alkyl) |
| 39 | d-Lys | Gln(N-C1-C8alkyl) |
| 40 | d-Cys | Gln(N-C1-C8alkyl) |
| 41 | Aib | His(N-C1-C8alkyl) |
| 42 | d-Ala | His(N-C1-C8alkyl) |
| 43 | d-Lys | His(N-C1-C8alkyl) |
| 44 | d-Cys | His(N-C1-C8alkyl) |
| 45 | Aib | Lys(N-C1-C8alkyl) |
| 46 | d-Ala | Lys(N-C1-C8alkyl) |
| 47 | d-Lys | Lys(N-C1-C8alkyl) |
| 48 | d-Cys | Lys(N-C1-C8alkyl) |
| 49 | Aib | Arg(N-C1-C8alkyl) |
| 50 | d-Ala | Arg(N-C1-C8alkyl) |
| 51 | d-Lys | Arg(N-C1-C8alkyl) |
| 52 | d-Cys | Arg(N-C1-C8alkyl) |
| 53 | Aib | Ser(N-C1-C8alkyl) |
| 54 | d-Ala | Ser(N-C1-C8alkyl) |
| 55 | d-Lys | Ser(N-C1-C8alkyl) |
| 56 | d-Cys | Ser(N-C1-C8alkyl) |
| 57 | Aib | Cys(N-C1-C8alkyl) |
| 58 | d-Ala | Cys(N-C1-C8alkyl) |
| 59 | d-Lys | Cys(N-C1-C8alkyl) |
| 60 | d-Cys | Cys(N-C1-C8alkyl) |
| 61 | Aib | Pro |
| 62 | d-Ala | Pro |
| 63 | d-Lys | Pro |
| 64 | d-Cys | Pro |
| 65 | Aib | Ala(N-methyl) |
| 66 | d-Ala | Ala(N-methyl) |
| 67 | d-Lys | Ala(N-methyl) |
| 68 | d-Cys | Ala(N-methyl) |
| 69 | Aib | Leu(N-methyl) |
| 70 | d-Ala | Leu(N-methyl) |
| 71 | d-Lys | Leu(N-methyl) |
| 72 | d-Cys | Leu(N-methyl) |
| 73 | Aib | Met(N-methyl) |
| 74 | d-Ala | Met(N-methyl) |
| 75 | d-Lys | Met(N-methyl) |
| 76 | d-Cys | Met(N-methyl) |
| 77 | Aib | Asn(N-methyl) |
| 78 | d-Ala | Asn(N-methyl) |
| 79 | d-Lys | Asn(N-methyl) |
| 80 | d-Cys | Asn(N-methyl) |
| 81 | Aib | Glu(N-methyl) |
| 82 | d-Ala | Glu(N-methyl) |
| 83 | d-Lys | Glu(N-methyl) |
| 84 | d-Cys | Glu(N-methyl) |
| 85 | Aib | Asp(N-methyl) |
| 86 | d-Ala | Asp(N-methyl) |
| 87 | d-Lys | Asp(N-methyl) |
| 88 | d-Cys | Asp(N-methyl) |
| 89 | Aib | Gln(N-methyl) |
| 90 | d-Ala | Gln(N-methyl) |
| 91 | d-Lys | Gln(N-methyl) |
| 92 | d-Cys | Gln(N-methyl) |
| 93 | Aib | His(N-methyl) |
| 94 | d-Ala | His(N-methyl) |
| 95 | d-Lys | His(N-methyl) |
| 96 | d-Cys | His(N-methyl) |
| 97 | Aib | Lys(N-methyl) |
| 98 | d-Ala | Lys(N-methyl) |
| 99 | d-Lys | Lys(N-methyl) |
| 100 | d-Cys | Lys(N-methyl) |
| 101 | Aib | Arg(N-methyl) |
| 102 | d-Ala | Arg(N-methyl) |
| 103 | d-Lys | Arg(N-methyl) |
| 104 | d-Cys | Arg(N-methyl) |
| 105 | Aib | Ser(N-methyl) |
| 106 | d-Ala | Ser(N-methyl) |
| 107 | d-Lys | Ser(N-methyl) |
| 108 | d-Cys | Ser(N-methyl) |
| 109 | Aib | Cys(N-methyl) |
| 110 | d-Ala | Cys(N-methyl) |
| 111 | d-Lys | Cys(N-methyl) |
| 112 | d-Cys | Cys(N-methyl) |
| 113 | Aib | Ala(N-hexyl) |
| 114 | d-Ala | Ala(N-hexyl) |
| 115 | d-Lys | Ala(N-hexyl) |
| 116 | d-Cys | Ala(N-hexyl) |
| 117 | Aib | Leu(N-hexyl) |
| 118 | d-Ala | Leu(N-hexyl) |
| 119 | d-Lys | Leu(N-hexyl) |
| 120 | d-Cys | Leu(N-hexyl) |
| 121 | Aib | Met(N-hexyl) |
| 122 | d-Ala | Met(N-hexyl) |
| 123 | d-Lys | Met(N-hexyl) |
| 124 | d-Cys | Met(N-hexyl) |
| 125 | Aib | Asn(N-hexyl) |
| 126 | d-Ala | Asn(N-hexyl) |
| 127 | d-Lys | Asn(N-hexyl) |
| 128 | d-Cys | Asn(N-hexyl) |
| 129 | Aib | Glu(N-hexyl) |
| 130 | d-Ala | Glu(N-hexyl) |
| 131 | d-Lys | Glu(N-hexyl) |
| 132 | d-Cys | Glu(N-hexyl) |
| 133 | Aib | Asp(N-hexyl) |
| 134 | d-Ala | Asp(N-hexyl) |
| 135 | d-Lys | Asp(N-hexyl) |
| 136 | d-Cys | Asp(N-hexyl) |
| 137 | Aib | Gln(N-hexyl) |
| 138 | d-Ala | Gln(N-hexyl) |
| 139 | d-Lys | Gln(N-hexyl) |
| 140 | d-Cys | Gln(N-hexyl) |
| 141 | Aib | His(N-hexyl) |
| 142 | d-Ala | His(N-hexyl) |
| 143 | d-Lys | His(N-hexyl) |
| 144 | d-Cys | His(N-hexyl) |
| 145 | Aib | Lys(N-hexyl) |
| 146 | d-Ala | Lys(N-hexyl) |
| 147 | d-Lys | Lys(N-hexyl) |
| 148 | d-Cys | Lys(N-hexyl) |
| 149 | Aib | Arg(N-hexyl) |
| 150 | d-Ala | Arg(N-hexyl) |
| 151 | d-Lys | Arg(N-hexyl) |
| 152 | d-Cys | Arg(N-hexyl) |
| 153 | Aib | Ser(N-hexyl) |
| 154 | d-Ala | Ser(N-hexyl) |
| 155 | d-Lys | Ser(N-hexyl) |
| 156 | d-Cys | Ser(N-hexyl) |
| 157 | Aib | Cys(N-hexyl) |
| 158 | d-Ala | Cys(N-hexyl) |
| 159 | d-Lys | Cys(N-hexyl) |
| 160 | d-Cys | Cys(N-hexyl) |

[1622] In some embodiments, the B amino acid of the dipeptide prodrug element is monosubstituted at the beta position and has a relatively bulky side chain, as shown in the below Table.

TABLE 7

| Dipeptide Prodrug Element # | Amino Acid ‘A’ | Amino Acid ‘B’ |
|---|---|---|
| 161 | Aib | Phe(N-C1-C8alkyl) |
| 162 | d-Ala | Phe(N-C1-C8alkyl) |
| 163 | d-Lys | Phe(N-C1-C8alkyl) |
| 164 | d-Cys | Phe(N-C1-C8alkyl) |
| 165 | Aib | Tyr(N-C1-C8alkyl) |
| 166 | d-Ala | Tyr(N-C1-C8alkyl) |
| 167 | d-Lys | Tyr(N-C1-C8alkyl) |
| 168 | d-Cys | Tyr(N-C1-C8alkyl) |
| 169 | Aib | Trp(N-C1-C8alkyl) |
| 170 | d-Ala | Trp(N-C1-C8alkyl) |
| 171 | d-Lys | Trp(N-C1-C8alkyl) |
| 172 | d-Cys | Trp(N-C1-C8alkyl) |
| 173 | Aib | Phe(N-methyl) |
| 174 | d-Ala | Phe(N-methyl) |
| 175 | d-Lys | Phe(N-methyl) |
| 176 | d-Cys | Phe(N-methyl) |
| 177 | Aib | Tyr(N-methyl) |
| 178 | d-Ala | Tyr(N-methyl) |
| 179 | d-Lys | Tyr(N-methyl) |
| 180 | d-Cys | Tyr(N-methyl) |
| 181 | Aib | Trp(N-methyl) |
| 182 | d-Ala | Trp(N-methyl) |
| 183 | d-Lys | Trp(N-methyl) |
| 184 | d-Cys | Trp(N-methyl) |
| 185 | Aib | Phe(N-hexyl) |
| 186 | d-Ala | Phe(N-hexyl) |
| 187 | d-Lys | Phe(N-hexyl) |
| 188 | d-Cys | Phe(N-hexyl) |
| 189 | Aib | Tyr(N-hexyl) |
| 190 | d-Ala | Tyr(N-hexyl) |
| 191 | d-Lys | Tyr(N-hexyl) |
| 192 | d-Cys | Tyr(N-hexyl) |
| 193 | Aib | Trp(N-hexyl) |
| 194 | d-Ala | Trp(N-hexyl) |
| 195 | d-Lys | Trp(N-hexyl) |
| 196 | d-Cys | Trp(N-hexyl) |

[1623] Sub-Category IC: Amino Acid B of the Dipeptide Prodrug Element Disubstituted at the Beta Position

[1624] In some embodiments, the B amino acid of the dipeptide prodrug element is disubstituted at the beta position. Nonlimiting examples of dipeptide prodrug elements having a B amino acid that is disubstituted at the beta position are shown in the below Table.

TABLE 8

| Dipeptide Prodrug Element # | Amino Acid ‘A’ | Amino Acid ‘B’ |
|---|---|---|
| 197 | Aib | Ile(N-C1-C8alkyl) |
| 198 | d-Ala | Ile(N-C1-C8alkyl) |
| 199 | d-Lys | Ile(N-C1-C8alkyl) |
| 200 | d-Cys | Ile(N-C1-C8alkyl)) |
| 201 | Aib | Val(N-C1-C8alkyl) |
| 202 | d-Ala | Val(N-C1-C8alkyl) |
| 203 | d-Lys | Val(N-C1-C8alkyl) |
| 204 | d-Cys | Val(N-C1-C8alkyl) |
| 205 | Aib | Thr(N-C1-C8alkyl) |
| 206 | d-Ala | Thr(N-C1-C8alkyl) |
| 207 | d-Lys | Thr(N-C1-C8alkyl) |
| 208 | d-Cys | Thr(N-C1-C8alkyl) |
| 209 | Aib | Ile(N-methyl) |
| 210 | d-Ala | Ile(N-methyl) |
| 211 | d-Lys | Ile(N-methyl) |
| 212 | d-Cys | Ile(N-methyl)) |
| 213 | Aib | Val(N-methyl) |
| 214 | d-Ala | Val(N-methyl) |
| 215 | d-Lys | Val(N-methyl) |
| 216 | d-Cys | Val(N-methyl) |
| 217 | Aib | Thr(N-methyl) |
| 218 | d-Ala | Thr(N-methyl) |
| 219 | d-Lys | Thr(N-methyl) |
| 220 | d-Cys | Thr(N-methyl) |
| 221 | Aib | Ile(N-hexyl) |
| 222 | d-Ala | Ile(N-hexyl) |
| 223 | d-Lys | Ile(N-hexyl) |
| 224 | d-Cys | Ile(N-hexyl) |
| 225 | Aib | Val(N-hexyl) |
| 226 | d-Ala | Val(N-hexyl) |
| 227 | d-Lys | Val(N-hexyl) |
| 228 | d-Cys | Val(N-hexyl) |
| 229 | Aib | Thr(N-hexyl) |
| 230 | d-Ala | Thr(N-hexyl) |
| 231 | d-Lys | Thr(N-hexyl) |
| 232 | d-Cys | Thr(N-hexyl)) |

[1625] Prodrugs

[1626] The dipeptide prodrug element is conjugated to any following glucagon related peptides through any position that interferes with the activity of the glucagon related peptide (e.g., to the alpha amine of the N-terminal amino acid, an aliphatic amino group on a side chain of an amino acid of Q (e.g., a lysine side chain), an aromatic amino group on a side chain of an amino acid of Q (e.g., aminophenylalanine, aminonapthylalanine, aminotryptophan, aminophenylglycine, aminohomophenylalanine). Exemplary positions when A-B is linked to an aliphatic amino group on a side chain of an amino acid of Q include positions 12, 16, 17, 18, 20, 28, or 29 of native glucagon (SEQ ID NO: 701). Exemplary positions when A-B is linked to an aromatic amino group on a side chain of an amino acid of Q include positions 10, 13, 22, or 25 of native glucagon (SEQ ID NO: 701). In some embodiments, the dipeptide prodrug element of the invention is conjugated to any one of SEQ ID NOs: 1-564, 566-570, 573-575, 577, 579-580, 585-612, 616, 618-632, 634-642, 647, 657-684, 701-732, 742-768, 801-878, 883-919, 1001-1262, 1301-1371, 1401-1518, 1701-1708, 1710, 1711, 1731-1734, 1738, 1740, 1741, 1745, and 1747-1776. For example, the dipeptide prodrug element can be conjugated to any one of SEQ ID NOs: 742-768.

[1627] In some exemplary embodiments, Aib-Gly(N-Hexyl), dLys-Gly(N-Hexyl), dCys-Gly(N-Hexyl), dAla-Gly(N-Hexyl), Aib-Gly(N-Methyl), dLys-Gly(N-Methyl), dCys-Gly(N-Methyl), dAla-Gly(N-Hexyl), Aib-Phe(N-Methyl), dLys-Phe(N-Methyl), dCys-Phe(N-Methyl), or dAla-Phe(N-Methyl) is conjugated to the N-terminal alpha amino group of any one of SEQ ID NOs: 742-745, 748-770, as represented by SEQ ID NOs.: 769-794 and listed in the below Table.

TABLE 9

| Prodrug | Dipeptide Prodrug | Glucagon Related |
|---|---|---|
| Number (P#) | Element | Peptide (SEQ ID NO.) |
| 1 | Aib-Gly(N-Hexyl) | 742 |
| 2 | Aib-Gly(N-Hexyl) | 743 |
| 3 | Aib-Gly(N-Hexyl) | 744 |
| 4 | Aib-Gly(N-Hexyl) | 745 |
| 5 | Aib-Gly(N-Hexyl) | 748 |
| 6 | Aib-Gly(N-Hexyl) | 749 |
| 7 | Aib-Gly(N-Hexyl) | 750 |
| 8 | Aib-Gly(N-Hexyl) | 751 |
| 9 | Aib-Gly(N-Hexyl) | 752 |
| 10 | Aib-Gly(N-Hexyl) | 753 |
| 11 | Aib-Gly(N-Hexyl) | 754 |
| 12 | Aib-Gly(N-Hexyl) | 755 |
| 13 | Aib-Gly(N-Hexyl) | 756 |
| 14 | Aib-Gly(N-Hexyl) | 757 |
| 15 | Aib-Gly(N-Hexyl) | 758 |
| 16 | Aib-Gly(N-Hexyl) | 759 |
| 17 | Aib-Gly(N-Hexyl) | 760 |
| 18 | Aib-Gly(N-Hexyl) | 761 |
| 19 | Aib-Gly(N-Hexyl) | 762 |
| 20 | Aib-Gly(N-Hexyl) | 763 |
| 21 | Aib-Gly(N-Hexyl) | 764 |
| 22 | Aib-Gly(N-Hexyl) | 765 |
| 23 | Aib-Gly(N-Hexyl) | 766 |
| 24 | Aib-Gly(N-Hexyl) | 767 |
| 25 | Aib-Gly(N-Hexyl) | 768 |
| 26 | dLys-Gly(N-Hexyl) | 742 |
| 27 | dLys-Gly(N-Hexyl) | 743 |
| 28 | dLys-Gly(N-Hexyl) | 744 |
| 29 | dLys-Gly(N-Hexyl) | 745 |
| 30 | dLys-Gly(N-Hexyl) | 748 |
| 31 | dLys-Gly(N-Hexyl) | 749 |
| 32 | dLys-Gly(N-Hexyl) | 750 |
| 33 | dLys-Gly(N-Hexyl) | 751 |
| 34 | dLys-Gly(N-Hexyl) | 752 |
| 35 | dLys-Gly(N-Hexyl) | 753 |
| 36 | dLys-Gly(N-Hexyl) | 754 |
| 37 | dLys-Gly(N-Hexyl) | 755 |
| 38 | dLys-Gly(N-Hexyl) | 756 |
| 39 | dLys-Gly(N-Hexyl) | 757 |
| 40 | dLys-Gly(N-Hexyl) | 758 |
| 41 | dLys-Gly(N-Hexyl) | 759 |
| 42 | dLys-Gly(N-Hexyl) | 760 |
| 43 | dLys-Gly(N-Hexyl) | 761 |
| 44 | dLys-Gly(N-Hexyl) | 762 |
| 45 | dLys-Gly(N-Hexyl) | 763 |
| 46 | dLys-Gly(N-Hexyl) | 764 |
| 47 | dLys-Gly(N-Hexyl) | 765 |
| 48 | dLys-Gly(N-Hexyl) | 766 |
| 49 | dLys-Gly(N-Hexyl) | 767 |
| 50 | dLys-Gly(N-Hexyl) | 768 |
| 51 | dCys-Gly(N-Hexyl) | 742 |
| 52 | dCys-Gly(N-Hexyl) | 743 |
| 53 | dCys-Gly(N-Hexyl) | 744 |
| 54 | dCys-Gly(N-Hexyl) | 745 |
| 55 | dCys-Gly(N-Hexyl) | 748 |
| 56 | dCys-Gly(N-Hexyl) | 749 |
| 57 | dCys-Gly(N-Hexyl) | 750 |
| 58 | dCys-Gly(N-Hexyl) | 751 |
| 59 | dCys-Gly(N-Hexyl) | 752 |
| 60 | dCys-Gly(N-Hexyl) | 753 |
| 61 | dCys-Gly(N-Hexyl) | 754 |
| 62 | dCys-Gly(N-Hexyl) | 755 |
| 63 | dCys-Gly(N-Hexyl) | 756 |
| 64 | dCys-Gly(N-Hexyl) | 757 |
| 65 | dCys-Gly(N-Hexyl) | 758 |
| 66 | dCys-Gly(N-Hexyl) | 759 |
| 67 | dCys-Gly(N-Hexyl) | 760 |
| 68 | dCys-Gly(N-Hexyl) | 761 |
| 69 | dCys-Gly(N-Hexyl) | 762 |
| 70 | dCys-Gly(N-Hexyl) | 763 |
| 71 | dCys-Gly(N-Hexyl) | 764 |
| 72 | dCys-Gly(N-Hexyl) | 765 |
| 73 | dCys-Gly(N-Hexyl) | 766 |
| 74 | dCys-Gly(N-Hexyl) | 767 |
| 75 | dCys-Gly(N-Hexyl) | 768 |
| 76 | dAla-Gly(N-Hexyl) | 742 |
| 77 | dAla-Gly(N-Hexyl) | 743 |
| 78 | dAla-Gly(N-Hexyl) | 744 |
| 79 | dAla-Gly(N-Hexyl) | 745 |
| 80 | dAla-Gly(N-Hexyl) | 748 |
| 81 | dAla-Gly(N-Hexyl) | 749 |
| 82 | dAla-Gly(N-Hexyl) | 750 |
| 83 | dAla-Gly(N-Hexyl) | 751 |
| 84 | dAla-Gly(N-Hexyl) | 752 |
| 85 | dAla-Gly(N-Hexyl) | 753 |
| 86 | dAla-Gly(N-Hexyl) | 754 |
| 87 | dAla-Gly(N-Hexyl) | 755 |
| 88 | dAla-Gly(N-Hexyl) | 756 |
| 89 | dAla-Gly(N-Hexyl) | 757 |
| 90 | dAla-Gly(N-Hexyl) | 758 |
| 91 | dAla-Gly(N-Hexyl) | 759 |
| 92 | dAla-Gly(N-Hexyl) | 760 |
| 93 | dAla-Gly(N-Hexyl) | 761 |
| 94 | dAla-Gly(N-Hexyl) | 762 |
| 95 | dAla-Gly(N-Hexyl) | 763 |
| 96 | dAla-Gly(N-Hexyl) | 764 |
| 97 | dAla-Gly(N-Hexyl) | 765 |
| 98 | dAla-Gly(N-Hexyl) | 766 |
| 99 | dAla-Gly(N-Hexyl) | 767 |
| 100 | dAla-Gly(N-Hexyl) | 768 |
| 101 | Aib-Gly(N-Methyl) | 742 |
| 102 | Aib-Gly(N-Methyl) | 743 |
| 103 | Aib-Gly(N-Methyl) | 744 |
| 104 | Aib-Gly(N-Methyl) | 745 |
| 105 | Aib-Gly(N-Methyl) | 748 |
| 106 | Aib-Gly(N-Methyl) | 749 |
| 107 | Aib-Gly(N-Methyl) | 750 |
| 108 | Aib-Gly(N-Methyl) | 751 |
| 109 | Aib-Gly(N-Methyl) | 752 |
| 110 | Aib-Gly(N-Methyl) | 753 |
| 111 | Aib-Gly(N-Methyl) | 754 |
| 112 | Aib-Gly(N-Methyl) | 755 |
| 113 | Aib-Gly(N-Methyl) | 756 |
| 114 | Aib-Gly(N-Methyl) | 757 |
| 115 | Aib-Gly(N-Methyl) | 758 |
| 116 | Aib-Gly(N-Methyl) | 759 |
| 117 | Aib-Gly(N-Methyl) | 760 |
| 118 | Aib-Gly(N-Methyl) | 761 |
| 119 | Aib-Gly(N-Methyl) | 762 |
| 120 | Aib-Gly(N-Methyl) | 763 |
| 121 | Aib-Gly(N-Methyl) | 764 |
| 122 | Aib-Gly(N-Methyl) | 765 |
| 123 | Aib-Gly(N-Methyl) | 766 |
| 124 | Aib-Gly(N-Methyl) | 767 |
| 125 | Aib-Gly(N-Methyl) | 768 |
| 126 | dLys-Gly(N-Methyl) | 742 |
| 127 | dLys-Gly(N-Methyl) | 743 |
| 128 | dLys-Gly(N-Methyl) | 744 |
| 129 | dLys-Gly(N-Methyl) | 745 |
| 130 | dLys-Gly(N-Methyl) | 748 |
| 131 | dLys-Gly(N-Methyl) | 749 |
| 132 | dLys-Gly(N-Methyl) | 750 |
| 133 | dLys-Gly(N-Methyl) | 751 |
| 134 | dLys-Gly(N-Methyl) | 752 |
| 135 | dLys-Gly(N-Methyl) | 753 |
| 136 | dLys-Gly(N-Methyl) | 754 |
| 137 | dLys-Gly(N-Methyl) | 755 |
| 138 | dLys-Gly(N-Methyl) | 756 |
| 139 | dLys-Gly(N-Methyl) | 757 |
| 140 | dLys-Gly(N-Methyl) | 758 |
| 141 | dLys-Gly(N-Methyl) | 759 |
| 142 | dLys-Gly(N-Methyl) | 760 |
| 143 | dLys-Gly(N-Methyl) | 761 |
| 144 | dLys-Gly(N-Methyl) | 762 |
| 145 | dLys-Gly(N-Methyl) | 763 |
| 146 | dLys-Gly(N-Methyl) | 764 |
| 147 | dLys-Gly(N-Methyl) | 765 |
| 148 | dLys-Gly(N-Methyl) | 766 |
| 149 | dLys-Gly(N-Methyl) | 767 |
| 150 | dLys-Gly(N-Methyl) | 768 |
| 151 | dCys-Gly(N-Methyl) | 742 |
| 152 | dCys-Gly(N-Methyl) | 743 |
| 153 | dCys-Gly(N-Methyl) | 744 |
| 154 | dCys-Gly(N-Methyl) | 745 |
| 155 | dCys-Gly(N-Methyl) | 748 |
| 156 | dCys-Gly(N-Methyl) | 749 |
| 157 | dCys-Gly(N-Methyl) | 750 |
| 158 | dCys-Gly(N-Methyl) | 751 |
| 159 | dCys-Gly(N-Methyl) | 752 |
| 160 | dCys-Gly(N-Methyl) | 753 |
| 161 | dCys-Gly(N-Methyl) | 754 |
| 162 | dCys-Gly(N-Methyl) | 755 |
| 163 | dCys-Gly(N-Methyl) | 756 |
| 164 | dCys-Gly(N-Methyl) | 757 |
| 165 | dCys-Gly(N-Methyl) | 758 |
| 166 | dCys-Gly(N-Methyl) | 759 |
| 167 | dCys-Gly(N-Methyl) | 760 |
| 168 | dCys-Gly(N-Methyl) | 761 |
| 169 | dCys-Gly(N-Methyl) | 762 |
| 170 | dCys-Gly(N-Methyl) | 763 |
| 171 | dCys-Gly(N-Methyl) | 764 |
| 172 | dCys-Gly(N-Methyl) | 765 |
| 173 | dCys-Gly(N-Methyl) | 766 |
| 174 | dCys-Gly(N-Methyl) | 767 |
| 175 | dCys-Gly(N-Methyl) | 768 |
| 176 | dAla-Gly(N-Methyl) | 742 |
| 177 | dAla-Gly(N-Methyl) | 743 |
| 178 | dAla-Gly(N-Methyl) | 744 |
| 179 | dAla-Gly(N-Methyl) | 745 |
| 180 | dAla-Gly(N-Methyl) | 748 |
| 181 | dAla-Gly(N-Methyl) | 749 |
| 182 | dAla-Gly(N-Methyl) | 750 |
| 183 | dAla-Gly(N-Methyl) | 751 |
| 184 | dAla-Gly(N-Methyl) | 752 |
| 185 | dAla-Gly(N-Methyl) | 753 |
| 186 | dAla-Gly(N-Methyl) | 754 |
| 187 | dAla-Gly(N-Methyl) | 755 |
| 188 | dAla-Gly(N-Methyl) | 756 |
| 189 | dAla-Gly(N-Methyl) | 757 |
| 190 | dAla-Gly(N-Methyl) | 758 |
| 191 | dAla-Gly(N-Methyl) | 759 |
| 192 | dAla-Gly(N-Methyl) | 760 |
| 193 | dAla-Gly(N-Methyl) | 761 |
| 194 | dAla-Gly(N-Methyl) | 762 |
| 195 | dAla-Gly(N-Methyl) | 763 |
| 196 | dAla-Gly(N-Methyl) | 764 |
| 197 | dAla-Gly(N-Methyl) | 765 |
| 198 | dAla-Gly(N-Methyl) | 766 |
| 199 | dAla-Gly(N-Methyl) | 767 |
| 200 | dAla-Gly(N-Methyl) | 768 |
| 201 | Aib-Phe(N-Methyl) | 742 |
| 202 | Aib-Phe(N-Methyl) | 743 |
| 203 | Aib-Phe(N-Methyl) | 744 |
| 204 | Aib-Phe(N-Methyl) | 745 |
| 205 | Aib-Phe(N-Methyl) | 748 |
| 206 | Aib-Phe(N-Methyl) | 749 |
| 207 | Aib-Phe(N-Methyl) | 750 |
| 208 | Aib-Phe(N-Methyl) | 751 |
| 209 | Aib-Phe(N-Methyl) | 752 |
| 210 | Aib-Phe(N-Methyl) | 753 |
| 211 | Aib-Phe(N-Methyl) | 754 |
| 212 | Aib-Phe(N-Methyl) | 755 |
| 213 | Aib-Phe(N-Methyl) | 756 |
| 214 | Aib-Phe(N-Methyl) | 757 |
| 215 | Aib-Phe(N-Methyl) | 758 |
| 216 | Aib-Phe(N-Methyl) | 759 |
| 217 | Aib-Phe(N-Methyl) | 760 |
| 218 | Aib-Phe(N-Methyl) | 761 |
| 219 | Aib-Phe(N-Methyl) | 762 |
| 220 | Aib-Phe(N-Methyl) | 763 |
| 221 | Aib-Phe(N-Methyl) | 764 |
| 222 | Aib-Phe(N-Methyl) | 765 |
| 223 | Aib-Phe(N-Methyl) | 766 |
| 224 | Aib-Phe(N-Methyl) | 767 |
| 225 | Aib-Phe(N-Methyl) | 768 |
| 226 | dLys-Phe(N-Methyl) | 742 |
| 227 | dLys-Phe(N-Methyl) | 743 |
| 228 | dLys-Phe(N-Methyl) | 744 |
| 229 | dLys-Phe(N-Methyl) | 745 |
| 230 | dLys-Phe(N-Methyl) | 748 |
| 231 | dLys-Phe(N-Methyl) | 749 |
| 232 | dLys-Phe(N-Methyl) | 750 |
| 233 | dLys-Phe(N-Methyl) | 751 |
| 234 | dLys-Phe(N-Methyl) | 752 |
| 235 | dLys-Phe(N-Methyl) | 753 |
| 236 | dLys-Phe(N-Methyl) | 754 |
| 237 | dLys-Phe(N-Methyl) | 755 |
| 238 | dLys-Phe(N-Methyl) | 756 |
| 239 | dLys-Phe(N-Methyl) | 757 |
| 240 | dLys-Phe(N-Methyl) | 758 |
| 241 | dLys-Phe(N-Methyl) | 759 |
| 242 | dLys-Phe(N-Methyl) | 760 |
| 243 | dLys-Phe(N-Methyl) | 761 |
| 244 | dLys-Phe(N-Methyl) | 762 |
| 245 | dLys-Phe(N-Methyl) | 763 |
| 246 | dLys-Phe(N-Methyl) | 764 |
| 247 | dLys-Phe(N-Methyl) | 765 |
| 248 | dLys-Phe(N-Methyl) | 766 |
| 249 | dLys-Phe(N-Methyl) | 767 |
| 250 | dLys-Phe(N-Methyl) | 768 |
| 251 | dCys-Phe(N-Methyl) | 742 |
| 252 | dCys-Phe(N-Methyl) | 743 |
| 253 | dCys-Phe(N-Methyl) | 744 |
| 254 | dCys-Phe(N-Methyl) | 745 |
| 255 | dCys-Phe(N-Methyl) | 748 |
| 256 | dCys-Phe(N-Methyl) | 749 |
| 257 | dCys-Phe(N-Methyl) | 750 |
| 258 | dCys-Phe(N-Methyl) | 751 |
| 259 | dCys-Phe(N-Methyl) | 752 |
| 260 | dCys-Phe(N-Methyl) | 753 |
| 261 | dCys-Phe(N-Methyl) | 754 |
| 262 | dCys-Phe(N-Methyl) | 755 |
| 263 | dCys-Phe(N-Methyl) | 756 |
| 264 | dCys-Phe(N-Methyl) | 757 |
| 265 | dCys-Phe(N-Methyl) | 758 |
| 266 | dCys-Phe(N-Methyl) | 759 |
| 267 | dCys-Phe(N-Methyl) | 760 |
| 268 | dCys-Phe(N-Methyl) | 761 |
| 269 | dCys-Phe(N-Methyl) | 762 |
| 267 | dCys-Phe(N-Methyl) | 763 |
| 271 | dCys-Phe(N-Methyl) | 764 |
| 272 | dCys-Phe(N-Methyl) | 765 |
| 273 | dCys-Phe(N-Methyl) | 766 |
| 274 | dCys-Phe(N-Methyl) | 767 |
| 275 | dCys-Phe(N-Methyl) | 768 |
| 276 | dAla-Phe(N-Methyl) | 742 |
| 277 | dAla-Phe(N-Methyl) | 743 |
| 278 | dAla-Phe(N-Methyl) | 744 |
| 279 | dAla-Phe(N-Methyl) | 745 |
| 280 | dAla-Phe(N-Methyl) | 748 |
| 281 | dAla-Phe(N-Methyl) | 749 |
| 282 | dAla-Phe(N-Methyl) | 750 |
| 283 | dAla-Phe(N-Methyl) | 751 |
| 284 | dAla-Phe(N-Methyl) | 752 |
| 285 | dAla-Phe(N-Methyl) | 753 |
| 286 | dAla-Phe(N-Methyl) | 754 |
| 287 | dAla-Phe(N-Methyl) | 755 |
| 288 | dAla-Phe(N-Methyl) | 756 |
| 289 | dAla-Phe(N-Methyl) | 757 |
| 290 | dAla-Phe(N-Methyl) | 758 |
| 291 | dAla-Phe(N-Methyl) | 759 |
| 292 | dAla-Phe(N-Methyl) | 760 |
| 293 | dAla-Phe(N-Methyl) | 761 |
| 294 | dAla-Phe(N-Methyl) | 762 |
| 295 | dAla-Phe(N-Methyl) | 763 |
| 296 | dAla-Phe(N-Methyl) | 764 |
| 297 | dAla-Phe(N-Methyl) | 765 |
| 298 | dAla-Phe(N-Methyl) | 766 |
| 299 | dAla-Phe(N-Methyl) | 767 |
| 300 | dAla-Phe(N-Methyl) | 768 |

[1628] Methods of Use

[1629] Glucagon Superfamily Peptides

[1630] In general, prodrugs comprising a glucagon superfamily peptide or a glucagon related peptide, such as a Class 1, 2, 3, 4, 5 and/or 6 peptide may be used for any purpose for which glucagon superfamily peptides and glucagon related peptides have been used (see for example as detailed above). For example, the disclosed bioactive peptide prodrug analogs are believed to be suitable for any use that has previously been described for its corresponding parent bioactive peptide. Accordingly, the glucagon related peptide prodrug analogs described herein can be used to treat hypoglycemia, hyperglycemia, diabetes, or other metabolic diseases that result from high/low blood levels of glucagon or high/low blood glucose levels. In accordance with some embodiments the patient to be treated using the prodrug disclosed herein is a domesticated animal, and in another embodiment the patient to be treated is a human.

[1631] In some embodiments, the prodrugs are used to reduce or suppress appetite, reduce food intake, induce weight loss, or assist in weight maintenance. Such methods for reducing appetite or promoting loss of body weight are expected to be useful in reducing body weight, preventing weight gain, or treating obesity of various causes, including drug-induced obesity, and reducing complications associated with obesity including vascular disease (coronary artery disease, stroke, peripheral vascular disease, ischemia reperfusion, etc.), hypertension, onset of diabetes type II, hyperlipidemia and musculoskeletal diseases.

[1632] In other embodiments, the prodrugs are used in conjunction with parenteral administration of nutrients to non-diabetic patients in a hospital setting, e.g., to patients receiving parenteral nutrition or total parenteral nutrition. Nonlimiting examples include surgery patients, patients in comas, patients with digestive tract illness, or a nonfunctional gastrointestinal tract (e.g. due to surgical removal, blockage or impaired absorptive capacity, Crohn's disease, ulcerative colitis, gastrointestinal tract obstruction, gastrointestinal tract fistula, acute panreatitis, ischemic bowel, major gastrointestinal surgery, certain congenital gastrointestinal tract anomalies, prolonged diarrhea, or short bowel syndrome due to surgery, patients in shock, and patients undergoing healing processes often receive parenteral administration of carbohydrates along with various combinations of lipids, electrolytes, minerals, vitamins and amino acids. The glucagon superfamily peptide prodrug and the parenteral nutrition composition can be administered at the same time, at different times, before, or after each other, provided that the glucagon superfamily peptide prodrug is exerting the desired biological effect at the time that the parenteral nutrition composition is being digested. For example, the parenteral nutrition may be administered, 1, 2 or 3 times per day, while the glucagon superfamily peptide prodrug is administered once every other day, three times a week, two times a week, once a week, once every 2 weeks, once every 3 weeks, or once a month.

[1633] Metabolic Syndrome, also known as metabolic syndrome X, insulin resistance syndrome or Reaven's syndrome, is a disorder that affects over 50 million Americans. Metabolic Syndrome is typically characterized by a clustering of at least three or more of the following risk factors: (1) abdominal obesity (excessive fat tissue in and around the abdomen), (2) atherogenic dyslipidemia (blood fat disorders including high triglycerides, low HDL cholesterol and high LDL cholesterol that enhance the accumulation of plaque in the artery walls), (3) elevated blood pressure, (4) insulin resistance or glucose intolerance, (5) prothrombotic state (e.g. high fibrinogen or plasminogen activator inhibitor-1 in blood), and (6) pro-inflammatory state (e.g. elevated C-reactive protein in blood). Other risk factors may include aging, hormonal imbalance and genetic predisposition.

[1634] Metabolic Syndrome is associated with an increased the risk of coronary heart disease and other disorders related to the accumulation of vascular plaque, such as stroke and peripheral vascular disease, referred to as atherosclerotic cardiovascular disease (ASCVD). Patients with Metabolic Syndrome may progress from an insulin resistant state in its early stages to full blown type II diabetes with further increasing risk of ASCVD. Without intending to be bound by any particular theory, the relationship between insulin resistance, Metabolic Syndrome and vascular disease may involve one or more concurrent pathogenic mechanisms including impaired insulin-stimulated vasodilation, insulin resistance-associated reduction in NO availability due to enhanced oxidative stress, and abnormalities in adipocyte-derived hormones such as adiponectin (Lteif and Mather, Can. J. Cardiol. 20 (suppl. B):66B-76B (2004)).

[1635] According to the 2001 National Cholesterol Education Program Adult Treatment Panel (ATP III), any three of the following traits in the same individual meet the criteria for Metabolic Syndrome: (a) abdominal obesity (a waist circumference over 102 cm in men and over 88 cm in women); (b) serum triglycerides (150 mg/dl or above); (c) HDL cholesterol (40 mg/dl or lower in men and 50 mg/dl or lower in women); (d) blood pressure (130/85 or more); and (e) fasting blood glucose (110 mg/dl or above). According to the World Health Organization (WHO), an individual having high insulin levels (an elevated fasting blood glucose or an elevated post meal glucose alone) with at least two of the following criteria meets the criteria for Metabolic Syndrome: (a) abdominal obesity (waist to hip ratio of greater than 0.9, a body mass index of at least 30 kg/m², or a waist measurement over 37 inches); (b) cholesterol panel showing a triglyceride level of at least 150 mg/dl or an HDL cholesterol lower than 35 mg/dl; (c) blood pressure of 140/90 or more, or on treatment for high blood pressure). (Mathur, Ruchi, “Metabolic Syndrome,” ed. Shiel, Jr., William C., MedicineNet.com, May 11, 2009).

[1636] For purposes herein, if an individual meets the criteria of either or both of the criteria set forth by the 2001 National Cholesterol Education Program Adult Treatment Panel or the WHO, that individual is considered as afflicted with Metabolic Syndrome.

[1637] Without being bound to any particular theory, glucagon peptides described herein are useful for treating Metabolic Syndrome. Accordingly, the invention provides a method of preventing or treating Metabolic Syndrome, or reducing one, two, three or more risk factors thereof, in a subject, comprising administering to the subject a glucagon peptide described herein in an amount effective to prevent or treat Metabolic Syndrome, or the risk factor thereof.

[1638] Nonalcoholic fatty liver disease (NAFLD) refers to a wide spectrum of liver disease ranging from simple fatty liver (steatosis), to nonalcoholic steatohepatitis (NASH), to cirrhosis (irreversible, advanced scarring of the liver). All of the stages of NAFLD have in common the accumulation of fat (fatty infiltration) in the liver cells (hepatocytes). Simple fatty liver is the abnormal accumulation of a certain type of fat, triglyceride, in the liver cells with no inflammation or scarring. In NASH, the fat accumulation is associated with varying degrees of inflammation (hepatitis) and scarring (fibrosis) of the liver. The inflammatory cells can destroy the liver cells (hepatocellular necrosis). In the terms “steatohepatitis” and “steatonecrosis”, steato refers to fatty infiltration, hepatitis refers to inflammation in the liver, and necrosis refers to destroyed liver cells. NASH can ultimately lead to scarring of the liver (fibrosis) and then irreversible, advanced scarring (cirrhosis). Cirrhosis that is caused by NASH is the last and most severe stage in the NAFLD spectrum. (Mendler, Michel, “Fatty Liver: Nonalcoholic Fatty Liver Disease (NAFLD) and Nonalcoholic Steatohepatitis (NASH),” ed. Schoenfield, Leslie J., MedicineNet.com, Aug. 29, 2005).

[1639] Alcoholic Liver Disease, or Alcohol-Induced Liver Disease, encompasses three pathologically distinct liver diseases related to or caused by the excessive consumption of alcohol: fatty liver (steatosis), chronic or acute hepatitis, and cirrhosis. Alcoholic hepatitis can range from a mild hepatitis, with abnormal laboratory tests being the only indication of disease, to severe liver dysfunction with complications such as jaundice (yellow skin caused by bilirubin retention), hepatic encephalopathy (neurological dysfunction caused by liver failure), ascites (fluid accumulation in the abdomen), bleeding esophageal varices (varicose veins in the esophagus), abnormal blood clotting and coma. Histologically, alcoholic hepatitis has a characteristic appearance with ballooning degeneration of hepatocytes, inflammation with neutrophils and sometimes Mallory bodies (abnormal aggregations of cellular intermediate filament proteins). Cirrhosis is characterized anatomically by widespread nodules in the liver combined with fibrosis. (Worman, Howard J., “Alcoholic Liver Disease”, Columbia University Medical Center website).

[1640] Without being bound to any particular theory, Class 2 and Class 3 glucagon related peptides described herein are useful for the treatment of Alcoholic Liver Disease, NAFLD, or any stage thereof, including, for example, steatosis, steatohepatitis, hepatitis, hepatic inflammation, NASH, cirrhosis, or complications thereof. Accordingly, the invention provides a method of preventing or treating Alcoholic Liver Disease, NAFLD, or any stage thereof, in a subject comprising administering to a subject a Class 2 or Class 3 glucagon peptide described herein in an amount effective to prevent or treat Alcoholic Liver Disease, NAFLD, or the stage thereof. Such treatment methods include reduction in one, two, three or more of the following: liver fat content, incidence or progression of cirrhosis, incidence of hepatocellular carcinoma, signs of inflammation, e.g. abnormal hepatic enzyme levels (e.g., aspartate aminotransferase AST and/or alanine aminotransferase ALT, or LDH), elevated serum ferritin, elevated serum bilirubin, and/or signs of fibrosis, e.g. elevated TGF-beta levels. In preferred embodiments, the Class 2 or Class 3 glucagon peptides are used treat patients who have progressed beyond simple fatty liver (steatosis) and exhibit signs of inflammation or hepatitis. Such methods may result, for example, in reduction of AST and/or ALT levels.

[1641] GLP-1 and exendin-4 have been shown to have some neuroprotective effect. The invention also provides uses of the glucagon superfamily peptides in treating neurodegenerative diseases, including but not limited to Alzheimer's disease, Parkinson's disease, Multiple Sclerosis, Amylotrophic Lateral Sclerosis, other demyelination related disorders, senile dementia, subcortical dementia, arteriosclerotic dementia, AIDS-associated dementia, or other dementias, a central nervous system cancer, traumatic brain injury, spinal cord injury, stroke or cerebral ischemia, cerebral vasculitis, epilepsy, Huntington's disease, Tourette's syndrome, Guillain Barre syndrome, Wilson disease, Pick's disease, neuroinflammatory disorders, encephalitis, encephalomyelitis or meningitis of viral, fungal or bacterial origin, or other central nervous system infections, prion diseases, cerebellar ataxias, cerebellar degeneration, spinocerebellar degeneration syndromes, Friedreichs ataxia, ataxia telangiectasia, spinal dysmyotrophy, progressive supranuclear palsy, dystonia, muscle spasticity, tremor, retinitis pigmentosa, striatonigral degeneration, mitochondrial encephalo-myopathies, neuronal ceroid lipofuscinosis, hepatic encephalopathies, renal encephalopathies, metabolic encephalopathies, toxin-induced encephalopathies, and radiation-induced brain damage.

[1642] Accordingly, the invention provides a method of preventing or treating neurodegenerative diseases, or reducing one, two, three or more risk factors thereof, in a subject, comprising administering to the subject a glucagon peptide described herein in an amount effective to prevent or treat a neurodegenerative disease, or the risk factor thereof.

[1643] The method of treating in accordance with the present invention comprises the steps of administering the presently disclosed prodrugs to a patient using any standard route of administration, including parenterally, such as intravenously, intraperitoneally, subcutaneously or intramuscularly, intrathecally, transdermally, rectally, orally, nasally or by inhalation. In some embodiments the composition is administered subcutaneously or intramuscularly, optionally into a depot or as part of a slow-release composition.

[1644] Compositions and Combinations

[1645] The prodrugs of the invention may be administered alone or in combination with a second agent such as anti-diabetic or anti-obesity agents. In some aspects, a prodrug is administered in combination with a second prodrug or a glucagon superfamily member, including for example a glucagon related peptide. In certain embodiments, a prodrug is administered in combination with and anti-diabetic agent, including but not limited to insulin, sulfonylureas, such as tolbutamide (Orinase), acetohexamide (Dymelor), tolazamide (Tolinase), chlorpropamide (Diabinese), glipizide (Glucotrol), glyburide (Diabeta, Micronase, Glynase), glimepiride (Amaryl), or gliclazide (Diamicron); meglitinides, such as repaglinide (Prandin) or nateglinide (Starlix); biguanides such as metformin (Glucophage) or phenformin; thiazolidinediones such as rosiglitazone (Avandia), pioglitazone (Actos), or troglitazone (Rezulin), or other PPARγ inhibitors; alpha glucosidase inhibitors that inhibit carbohydrate digestion, such as miglitol (Glyset), acarbose (Precose/Glucobay); exenatide (Byetta) or pramlintide; Dipeptidyl peptidase-4 (DPP-IV) inhibitors such as vildagliptin or sitagliptin; SGLT (sodium-dependent glucose transporter 1) inhibitors; or FBPase (fructose 1,6-bisphosphatase) inhibitors.

[1646] Anti-obesity agents known in the art or under investigation include but are not limited to appetite suppressants, including phenethylamine type stimulants, phentermine (optionally with fenfluramine or dexfenfluramine), diethylpropion (Tenuate®), phendimetrazine (Prelu-2®, Bontril®), benzphetamine (Didrex®), sibutramine (Meridia®, Reductil®); rimonabant (Acomplia®), other cannabinoid receptor antagonists; oxyntomodulin; fluoxetine hydrochloride (Prozac); Qnexa (topiramate and phentermine), Excalia (bupropion and zonisamide) or Contrave (bupropion and naltrexone); or lipase inhibitors, similar to xenical (Orlistat) or Cetilistat (also known as ATL-962), or GT 389-255.

[1647] The prodrugs of the present invention can also be administered to patients suffering from catabolic wasting. It is estimated that over half of cancer patients experience catabolic wasting which is characterized by unintended and progressive weight loss, weakness, and low body fat and muscle. The syndrome is equally common in AIDS patients and can also be present in bacterial and parasitic diseases, rheumatoid arthritis, and chronic diseases of the bowel, liver, lungs, and heart. It is usually associated with anorexia and can manifest as a condition in aging or as a result of physical trauma. Catabolic wasting is a symptom that diminishes the quality of life, worsens the underlying condition, and is a major cause of death. Pharmaceutical compositions comprising the prodrugs disclosed herein can be formulated and administered to patients using standard pharmaceutically acceptable carriers and routes of administration known to those skilled in the art. Accordingly, the present disclosure also encompasses pharmaceutical compositions comprising one or more of the prodrugs disclosed herein, or a pharmaceutically acceptable salt thereof, in combination with a pharmaceutically acceptable carrier. In some embodiments the pharmaceutical composition comprises a 1 mg/ml concentration of the prodrug at pH of about 4.0 to about 7.0 in a phosphate buffer system. The pharmaceutical compositions may comprise the prodrug as the sole pharmaceutically active component, or the prodrugs can be combined with one or more additional active agents. In accordance with some embodiments a composition is provided comprising a prodrug of the present invention. Alternatively, a composition is provided for inducing weight loss or preventing weight gain can be provided that comprises a prodrug and an anti-obesity peptide. Suitable anti-obesity peptides include those disclosed in U.S. Pat. Nos. 5,691,309, 6,436,435 or US Patent application 20050176643.

[1648] In accordance with some embodiments a pharmaceutical composition is provided comprising any of the novel prodrugs disclosed herein, preferably sterile and preferably at a purity level of at least 90%, 91%, 92%, 93%, 94%, 95%, 96%, 97%, 98% or 99%, and a pharmaceutically acceptable diluent, carrier or excipient. Such compositions may contain a bioactive peptide prodrug derivative as disclosed herein, wherein the resulting active peptide is present at a concentration of at least 0.5 mg/ml, 1 mg/ml, 2 mg/ml, 3 mg/ml, 4 mg/ml, 5 mg/ml, 6 mg/ml, 7 mg/ml, 8 mg/ml, 9 mg/ml, 10 mg/ml, 11 mg/ml, 12 mg/ml, 13 mg/ml, 14 mg/ml, 15 mg/ml, 16 mg/ml, 17 mg/ml, 18 mg/ml, 19 mg/ml, 20 mg/ml, 21 mg/ml, 22 mg/ml, 23 mg/ml, 24 mg/ml, 25 mg/ml or higher. Such compositions may contain a bioactive peptide prodrug derivative of Class 1, 2, 6, or 3 as disclosed herein, wherein the resulting active peptide is present at a concentration of at least A, wherein A is 0.001 mg/ml, 0.01 mg/ml, 0.1 mg/ml, 0.5 mg/ml, 1 mg/ml, 2 mg/ml, 3 mg/ml, 4 mg/ml, 5 mg/ml, 6 mg/ml, 7 mg/ml, 8 mg/ml, 9 mg/ml, 10 mg/ml, 11 mg/ml, 12 mg/ml, 13 mg/ml, 14 mg/ml, 15 mg/ml, 16 mg/ml, 17 mg/ml, 18 mg/ml, 19 mg/ml, 20 mg/ml, 21 mg/ml, 22 mg/ml, 23 mg/ml, 24 mg/ml, 25 mg/ml or higher. In other embodiments, such compositions may contain an active peptide of Class 1, 2, 6, or 3 at a concentration of at most B, wherein B is 30 mg/ml, 25 mg/ml, 24 mg/ml, 23, mg/ml, 22 mg/ml, 21 mg/ml, 20 mg/ml, 19 mg/ml, 18 mg/ml, 17 mg/ml, 16 mg/ml, 15 mg/ml, 14 mg/ml, 13 mg/ml, 12 mg/ml, 11 mg/ml 10 mg/ml, 9 mg/ml, 8 mg/ml, 7 mg/ml, 6 mg/ml, 5 mg/ml, 4 mg/ml, 3 mg/ml, 2 mg/ml, 1 mg/ml, or 0.1 mg/ml. In some embodiments, the compositions may contain a Class 1, 2, 6, or 3 glucagon related peptide at a concentration range of A to B mg/ml, for example, 0.001 to 30.0 mg/ml. In some embodiments the pharmaceutical compositions comprise aqueous solutions that are sterilized and optionally stored within various containers. The compounds of the present invention can be used in accordance with some embodiments to prepare pre-formulated solutions ready for injection. In other embodiments the pharmaceutical compositions comprise a lyophilized powder. The pharmaceutical compositions can be further packaged as part of a kit that includes a disposable device for administering the composition to a patient. The containers or kits may be labeled for storage at ambient room temperature or at refrigerated temperature.

[1649] All therapeutic methods, pharmaceutical compositions, kits and other similar embodiments described herein contemplate that the prodrug compounds include all pharmaceutically acceptable salts thereof.

[1650] In some embodiments the kit is provided with a device for administering the prodrug composition to a patient. The kit may further include a variety of containers, e.g., vials, tubes, bottles, and the like. Preferably, the kits will also include instructions for use. In accordance with some embodiments the device of the kit is an aerosol dispensing device, wherein the composition is prepackaged within the aerosol device. In another embodiment the kit comprises a syringe and a needle, and in some embodiments the prodrug composition is prepackaged within the syringe.

[1651] Pharmaceutical Formulations of Class 1, 2, 6, and 3 Glucagon Related Peptides

[1652] In accordance with some embodiments a pharmaceutical composition is provided wherein the composition comprises a glucadon peptide of the present disclosure, or pharmaceutically acceptable salt thereof, and a pharmaceutically acceptable carrier. The pharmaceutical composition can comprise any pharmaceutically acceptable ingredient, including, for example, acidifying agents, additives, adsorbents, aerosol propellants, air displacement agents, alkalizing agents, anticaking agents, anticoagulants, antimicrobial preservatives, antioxidants, antiseptics, bases, binders, buffering agents, chelating agents, coating agents, coloring agents, desiccants, detergents, diluents, disinfectants, disintegrants, dispersing agents, dissolution enhancing agents, dyes, emollients, emulsifying agents, emulsion stabilizers, fillers, film forming agents, flavor enhancers, flavoring agents, flow enhancers, gelling agents, granulating agents, humectants, lubricants, mucoadhesives, ointment bases, ointments, oleaginous vehicles, organic bases, pastille bases, pigments, plasticizers, polishing agents, preservatives, sequestering agents, skin penetrants, solubilizing agents, solvents, stabilizing agents, suppository bases, surface active agents, surfactants, suspending agents, sweetening agents, therapeutic agents, thickening agents, tonicity agents, toxicity agents, viscosity-increasing agents, water-absorbing agents, water-miscible cosolvents, water softeners, or wetting agents.

[1653] In some embodiments, the pharmaceutical composition comprises any one or a combination of the following components: acacia, acesulfame potassium, acetyltributyl citrate, acetyltriethyl citrate, agar, albumin, alcohol, dehydrated alcohol, denatured alcohol, dilute alcohol, aleuritic acid, alginic acid, aliphatic polyesters, alumina, aluminum hydroxide, aluminum stearate, amylopectin, α-amylose, ascorbic acid, ascorbyl palmitate, aspartame, bacteriostatic water for injection, bentonite, bentonite magma, benzalkonium chloride, benzethonium chloride, benzoic acid, benzyl alcohol, benzyl benzoate, bronopol, butylated hydroxyanisole, butylated hydroxytoluene, butylparaben, butylparaben sodium, calcium alginate, calcium ascorbate, calcium carbonate, calcium cyclamate, dibasic anhydrous calcium phosphate, dibasic dehydrate calcium phosphate, tribasic calcium phosphate, calcium propionate, calcium silicate, calcium sorbate, calcium stearate, calcium sulfate, calcium sulfate hemihydrate, canola oil, carbomer, carbon dioxide, carboxymethyl cellulose calcium, carboxymethyl cellulose sodium, β-carotene, carrageenan, castor oil, hydrogenated castor oil, cationic emulsifying wax, cellulose acetate, cellulose acetate phthalate, ethyl cellulose, microcrystalline cellulose, powdered cellulose, silicified microcrystalline cellulose, sodium carboxymethyl cellulose, cetostearyl alcohol, cetrimide, cetyl alcohol, chlorhexidine, chlorobutanol, chlorocresol, cholesterol, chlorhexidine acetate, chlorhexidine gluconate, chlorhexidine hydrochloride, chlorodifluoroethane (HCFC), chlorodifluoromethane, chlorofluorocarbons (CFC)chlorophenoxyethanol, chloroxylenol, corn syrup solids, anhydrous citric acid, citric acid monohydrate, cocoa butter, coloring agents, corn oil, cottonseed oil, cresol, m-cresol, o-cresol, p-cresol, croscarmellose sodium, crospovidone, cyclamic acid, cyclodextrins, dextrates, dextrin, dextrose, dextrose anhydrous, diazolidinyl urea, dibutyl phthalate, dibutyl sebacate, diethanolamine, diethyl phthalate, difluoroethane (HFC), dimethyl-β-cyclodextrin, cyclodextrin-type compounds such as Captisol®, dimethyl ether, dimethyl phthalate, dipotassium edentate, disodium edentate, disodium hydrogen phosphate, docusate calcium, docusate potassium, docusate sodium, dodecyl gallate, dodecyltrimethylammonium bromide, edentate calcium disodium, edtic acid, eglumine, ethyl alcohol, ethylcellulose, ethyl gallate, ethyl laurate, ethyl maltol, ethyl oleate, ethylparaben, ethylparaben potassium, ethylparaben sodium, ethyl vanillin, fructose, fructose liquid, fructose milled, fructose pyrogen-free, powdered fructose, fumaric acid, gelatin, glucose, liquid glucose, glyceride mixtures of saturated vegetable fatty acids, glycerin, glyceryl behenate, glyceryl monooleate, glyceryl monostearate, self-emulsifying glyceryl monostearate, glyceryl palmitostearate, glycine, glycols, glycofurol, guar gum, heptafluoropropane (HFC), hexadecyltrimethylammonium bromide, high fructose syrup, human serum albumin, hydrocarbons (HC), dilute hydrochloric acid, hydrogenated vegetable oil, type II, hydroxyethyl cellulose, 2-hydroxyethyl-β-cyclodextrin, hydroxypropyl cellulose, low-substituted hydroxypropyl cellulose, 2-hydroxypropyl-β-cyclodextrin, hydroxypropyl methylcellulose, hydroxypropyl methylcellulose phthalate, imidurea, indigo carmine, ion exchangers, iron oxides, isopropyl alcohol, isopropyl myristate, isopropyl palmitate, isotonic saline, kaolin, lactic acid, lactitol, lactose, lanolin, lanolin alcohols, anhydrous lanolin, lecithin, magnesium aluminum silicate, magnesium carbonate, normal magnesium carbonate, magnesium carbonate anhydrous, magnesium carbonate hydroxide, magnesium hydroxide, magnesium lauryl sulfate, magnesium oxide, magnesium silicate, magnesium stearate, magnesium trisilicate, magnesium trisilicate anhydrous, malic acid, malt, maltitol, maltitol solution, maltodextrin, maltol, maltose, mannitol, medium chain triglycerides, meglumine, menthol, methylcellulose, methyl methacrylate, methyl oleate, methylparaben, methylparaben potassium, methylparaben sodium, microcrystalline cellulose and carboxymethylcellulose sodium, mineral oil, light mineral oil, mineral oil and lanolin alcohols, oil, olive oil, monoethanolamine, montmorillonite, octyl gallate, oleic acid, palmitic acid, paraffin, peanut oil, petrolatum, petrolatum and lanolin alcohols, pharmaceutical glaze, phenol, liquified phenol, phenoxyethanol, phenoxypropanol, phenylethyl alcohol, phenylmercuric acetate, phenylmercuric borate, phenylmercuric nitrate, polacrilin, polacrilin potassium, poloxamer, polydextrose, polyethylene glycol, polyethylene oxide, polyacrylates, polyethylene-polyoxypropylene-block polymers, polymethacrylates, polyoxyethylene alkyl ethers, polyoxyethylene castor oil derivatives, polyoxyethylene sorbitol fatty acid esters, polyoxyethylene stearates, polyvinyl alcohol, polyvinyl pyrrolidone, potassium alginate, potassium benzoate, potassium bicarbonate, potassium bisulfite, potassium chloride, potassium citrate, potassium citrate anhydrous, potassium hydrogen phosphate, potassium metabisulfite, monobasic potassium phosphate, potassium propionate, potassium sorbate, povidone, propanol, propionic acid, propylene carbonate, propylene glycol, propylene glycol alginate, propyl gallate, propylparaben, propylparaben potassium, propylparaben sodium, protamine sulfate, rapeseed oil, Ringer's solution, saccharin, saccharin ammonium, saccharin calcium, saccharin sodium, safflower oil, saponite, serum proteins, sesame oil, colloidal silica, colloidal silicon dioxide, sodium alginate, sodium ascorbate, sodium benzoate, sodium bicarbonate, sodium bisulfite, sodium chloride, anhydrous sodium citrate, sodium citrate dehydrate, sodium chloride, sodium cyclamate, sodium edentate, sodium dodecyl sulfate, sodium lauryl sulfate, sodium metabisulfite, sodium phosphate, dibasic, sodium phosphate, monobasic, sodium phosphate, tribasic, anhydrous sodium propionate, sodium propionate, sodium sorbate, sodium starch glycolate, sodium stearyl fumarate, sodium sulfite, sorbic acid, sorbitan esters (sorbitan fatty esters), sorbitol, sorbitol solution 70%, soybean oil, spermaceti wax, starch, corn starch, potato starch, pregelatinized starch, sterilizable maize starch, stearic acid, purified stearic acid, stearyl alcohol, sucrose, sugars, compressible sugar, confectioner's sugar, sugar spheres, invert sugar, Sugartab, Sunset Yellow FCF, synthetic paraffin, talc, tartaric acid, tartrazine, tetrafluoroethane (HFC), theobroma oil, thimerosal, titanium dioxide, alpha tocopherol, tocopheryl acetate, alpha tocopheryl acid succinate, beta-tocopherol, delta-tocopherol, gamma-tocopherol, tragacanth, triacetin, tributyl citrate, triethanolamine, triethyl citrate, trimethyl-β-cyclodextrin, trimethyltetradecylammonium bromide, tris buffer, trisodium edentate, vanillin, type I hydrogenated vegetable oil, water, soft water, hard water, carbon dioxide-free water, pyrogen-free water, water for injection, sterile water for inhalation, sterile water for injection, sterile water for irrigation, waxes, anionic emulsifying wax, carnauba wax, cationic emulsifying wax, cetyl ester wax, microcrystalline wax, nonionic emulsifying wax, suppository wax, white wax, yellow wax, white petrolatum, wool fat, xanthan gum, xylitol, zein, zinc propionate, zinc salts, zinc stearate, or any excipient in the Handbook of Pharmaceutical Excipients, Third Edition, A. H. Kibbe (Pharmaceutical Press, London, U K, 2000), which is incorporated by reference in its entirety. Remington's Pharmaceutical Sciences, Sixteenth Edition, E. W. Martin (Mack Publishing Co., Easton, Pa., 1980), which is incorporated by reference in its entirety, discloses various components used in formulating pharmaceutically acceptable compositions and known techniques for the preparation thereof. Except insofar as any conventional agent is incompatible with the pharmaceutical compositions, its use in pharmaceutical compositions is contemplated. Supplementary active ingredients also can be incorporated into the compositions.

[1654] The pharmaceutical formulations disclosed herein may be designed to be short-acting, fast-releasing, long-acting, or sustained-releasing as described below. The pharmaceutical formulations may also be formulated for immediate release, controlled release or for slow release. The instant compositions may further comprise, for example, micelles or liposomes, or some other encapsulated form, or may be administered in an extended release form to provide a prolonged storage and/or delivery effect. The disclosed pharmaceutical formulations may be administered according to any regime including, for example, daily (1 time per day, 2 times per day, 3 times per day, 4 times per day, 5 times per day, 6 times per day), every two days, every three days, every four days, every five days, every six days, weekly, bi-weekly, every three weeks, monthly, or bi-monthly.

[1655] In some embodiments, the foregoing component(s) may be present in the pharmaceutical composition at any concentration, such as, for example, at least A, wherein A is 0.0001% w/v, 0.001% w/v, 0.01% w/v, 0.1% w/v, 1% w/v, 2% w/v, 5% w/v, 10% w/v, 20% w/v, 30% w/v, 40% w/v, 50% w/v, 60% w/v, 70% w/v, 80% w/v, or 90% w/v. In some embodiments, the foregoing component(s) may be present in the pharmaceutical composition at any concentration, such as, for example, at most B, wherein B is 90% w/v, 80% w/v, 70% w/v, 60% w/v, 50% w/v, 40% w/v, 30% w/v, 20% w/v, 10% w/v, 5% w/v, 2% w/v, 1% w/v, 0.1% w/v, 0.001% w/v, or 0.0001%. In other embodiments, the foregoing component(s) may be present in the pharmaceutical composition at any concentration range, such as, for example from about A to about B. In some embodiments, A is 0.0001% and B is 90%.

[1656] The pharmaceutical compositions may be formulated to achieve a physiologically compatible pH. In some embodiments, the pH of the pharmaceutical composition may be at least 5, at least 5.5, at least 6, at least 6.5, at least 7, at least 7.5, at least 8, at least 8.5, at least 9, at least 9.5, at least 10, or at least 10.5 up to and including pH 11, depending on the formulation and route of administration. In certain embodiments, the pharmaceutical compositions may comprise buffering agents to achieve a physiological compatible pH. The buffering agents may include any compounds capable of buffering at the desired pH such as, for example, phosphate buffers (e.g. PBS), triethanolamine, Tris, bicine, TAPS, tricine, HEPES, TES, MOPS, PIPES, cacodylate, MES, and others. In certain embodiments, the strength of the buffer is at least 0.5 mM, at least 1 mM, at least 5 mM, at least 10 mM, at least 20 mM, at least 30 mM, at least 40 mM, at least 50 mM, at least 60 mM, at least 70 mM, at least 80 mM, at least 90 mM, at least 100 mM, at least 120 mM, at least 150 mM, or at least 200 mM. In some embodiments, the strength of the buffer is no more than 300 mM (e.g. at most 200 mM, at most 100 mM, at most 90 mM, at most 80 mM, at most 70 mM, at most 60 mM, at most 50 mM, at most 40 mM, at most 30 mM, at most 20 mM, at most 10 mM, at most 5 mM, at most 1 mM).

[1657] The prodrug compounds disclosed herein may be prepared by standard synthetic methods, recombinant DNA techniques, or any other methods of preparing peptides and fusion proteins. Although certain non-natural amino acids cannot be expressed by standard recombinant DNA techniques, techniques for their preparation are known in the art. Compounds of this invention that encompass non-peptide portions may be synthesized by standard organic chemistry reactions, in addition to standard peptide chemistry reactions when applicable.

### EXAMPLES

### Example 1

### Synthesis of Glucagon and GLP-1 Analogs

[1658] To investigate the possibility of preparing a bioactive derivative of glucagon and GLP-1, numerous peptide analogs were synthesized. The standard procedure is described briefly here, and the details are discussed later.

[1659] Materials:

[1660] PAM resin (PAM resin is OCH₂-phenylacetamidomethyl-copolystyrene-1% divinylbenzene), (100-180 mesh, 1% DVB cross-linked polystyrene; loading of 0.7-1.0 mmol/g), Boc-protected and Fmoc protected amino acids were purchased from Midwest Biotech. Other reagents such as the α-hydroxy-acids (phenyllactic acid and glycolic acid) were purchased from Aldrich. The solid phase peptide syntheses using Boc-protected amino acids were performed on an Applied Biosystem 430A Peptide Synthesizer. Fmoc protected amino acid synthesis was performed using the Applied Biosystems Model 433 Peptide Synthesizer. The manual synthesis of depsi-peptides was performed in sintered reaction vessels using analogous procedures (Schnolzer, M., et al., (1992) Int J Pept Protein Res 40(3-4):180-193).

[1661] Peptide Synthesis (Boc Amino Acids/HF Cleavage):

[1662] Synthesis of these analogs was performed on the Applied Biosystem Model 430A Peptide Synthesizer. Synthetic peptides were constructed by sequential addition of amino acids, and activated esters of each amino acid were generated by the addition of 1.9 mmol (3.8 mL of a 0.5 M solution) of 3-(Diethoxy-phosphoryloxy)-3H-benzo[d][1,2,3]triazin-4-one (DEPBT) in DMF to a cartridge containing 2 mmol of Boc protected amino acid. The amino acids were dissolved by bubbling nitrogen gas through the cartridge. One mL of N,N-Diisopropylethylamine was added to the cartridge to effect ester formation. This solution was transferred to the reaction vessel containing the 0.2 mmol of the C-terminal residue attached to the PAM resin, vortexed several times, and allowed to couple to the resin for 10 minutes. After washing to remove the unreacted reagents, the N-terminal Boc protecting group was removed by treatment with trifluoroacetic acid (TFA) for 5 minutes. The resin was washed with DMF and the cycle was repeated for the desired number of steps until the chain was assembled. The reaction vessel at the end of the synthesis (typically 30 amino acids) contained approximately 1.2-1.5 g of protected peptidyl-PAM resin. The resin was washed numerous times with dimethylformamide (DMF), treated with trifluoroacetic acid to remove the last t-Boc protecting group and finally washed several additional times with DMF, dichloromethane (DCM) and dried.

[1663] The peptidyl-resin was treated with anhydrous HF (procedure detailed later in this section), and this typically yielded approximately 350 mg (about 50% yield) of a crude deprotected-peptide.

[1664] Peptide Synthesis (Fmoc Amino Acids/HF Cleavage):

[1665] This synthesis scheme was performed manually with a few amino acids at selective sites. In this work, the Fmoc amino acids were used only to synthesize internal serine prodrugs, as a part of a wider synthetic strategy. Here, it is to be noted that although Fmoc chemistry has been used in the synthesis, the peptides have always been built on PAM resin that required treatment with HF to cleave the peptide from the solid support. The yield of these peptides is approximately as stated earlier for Boc/PAM synthesis.

[1666] The synthesis was carried out as described in the previous section.

[1667] At the end of the coupling step, the peptidyl-resin was treated with 20% piperidine to remove the N-terminal Fmoc protecting group. It was washed repeatedly with DMF and this repetitive cycle was repeated for the desired number of coupling steps. The peptidyl-resin at the end of the entire synthesis was dried by using DCM, and the peptide was cleaved from the resin with anhydrous HF.

[1668] HF Treatment of the Peptidyl-Resin

[1669] The peptidyl-resin (30 mg to 200 mg) was placed in the hydrogen fluoride (HF) reaction vessel for cleavage. 500 μL of p-cresol was added to the vessel as a carbonium ion scavenger. The vessel was attached to the HF system and submerged in a methanol/dry ice mixture. The vessel was evacuated with a vacuum pump and 10 mL of HF was distilled to the reaction vessel. This reaction mixture of the peptidyl-resin and the HF was stirred for one hour at 0° C., after which a vacuum was established and the HF was quickly evacuated (10-15 min). The vessel was removed carefully and filled with approximately 35 mL of ether to precipitate the peptide and to extract the p-cresol and small molecule organic protecting groups resulting from HF treatment. This mixture was filtered utilizing a teflon filter and repeated twice to remove all excess cresol. This filtrate was discarded. The precipitated peptide dissolved in approximately 20 mL of 10% acetic acid (aq). This filtrate, which contained the desired peptide, was collected and lyophilized.

[1670] Analysis Using Mass Spectrometry

[1671] The mass spectra were obtained using a Sciex API-III electrospray quadrapole mass spectrometer with a standard ESI ion source. Ionization conditions that were used are as follows: ESI in the positive-ion mode; ion spray voltage, 3.9 kV; orifice potential, 60 V. The nebulizing and curtain gas used was nitrogen with a flow rate of 0.9 L/min. Mass spectra were recorded from 600-1800 Thompsons at 0.5 Th per step and 2 msec dwell time. The sample (about 1 mg/mL) was dissolved in 50% aqueous acetonitrile with 1% acetic acid and introduced by an external syringe pump at the rate of 5 μL/min.

[1672] When the peptides were analyzed in PBS solution by ESI-MS, they were first desalted using a ZipTip solid phase extraction tip containing 0.6 μL C4 resin, according to instructions provided by the manufacturer (Millipore Corporation, Billerica, Mass., see the Millipore web site of the world wide web at millipore.com/catalogue.nsf/docs/C5737).

[1673] High Performance Liquid Chromatography (HPLC) Analysis:

[1674] Preliminary analyses were performed with these crude peptides for an approximation of their relative conversion rates in Phosphate Buffered Saline (PBS) buffer (pH, 7.2) using high performance liquid chromatography (HPLC) and MALDI analysis. The crude peptide samples were dissolved in the PBS buffer at a concentration of 1 mg/mL. One mL of the resulting solution was stored in a 1.5 mL HPLC vial, which was then sealed and incubated at 37° C. Aliquots of 100 μL were drawn out at various time intervals, cooled to room temperature and analyzed by HPLC.

[1675] The HPLC analyses were performed using a Beckman System Gold Chromatography system using a UV detector at 214 nm. HPLC analyses were performed on a 150 mm×4.6 mm C18 Vydac column. The flow rate was 1 mL/min. Solvent A contained 0.1% TFA in distilled water, and solvent B contained 0.1% TFA in 90% CH₃CN. A linear gradient was employed (40% to 70% B in 15 minutes). The data were collected and analyzed using Peak Simple Chromatography software.

[1676] The initial rates of hydrolysis were used to measure the rate constant for the dissociation of the respective prodrugs. The concentrations of the prodrug and the drug were estimated from their peak areas respectively. The first order dissociation rate constants of the prodrugs were determined by plotting the logarithm of the concentration of the prodrug at various time intervals. The slope of this plot gives the rate constant ‘k’. The half lives of the degradation of the various prodrugs were then calculated by using the formula t_{1/2}=0.693/k.

[1677] Preparative Purification Using HPLC:

[1678] Once a prodrug displaying an appropriate t_{1/2} was identified, the prodrug was purified. The purification was performed using HPLC analysis on a silica based 1×25 cm Vydac C18 (5μ particle size, 300 A° pore size) column. The instruments used were: Waters Associates model 600 pump, Injector model 717, and UV detector model 486. A wavelength of 214 nm was used for all samples. Solvent A contained 10% CH₃CN/0.1% TFA in distilled water, and solvent B contained 0.1% TFA in CH₃CN. A linear gradient was employed (0 to 100% B in 2 hours). The flow rate was 1.2 mL/min and the fraction size was 6 mL. From about 350 mg of crude peptide, 80 mg of the pure peptide (about 23% yield) was typically obtained.

### Example 2

### Bioassay Experimental Design: Luciferase-Based Reporter Gene Assay for cAMP Detection

[1679] The ability of each glucagon and GLP-1 analog or prodrug to induce cAMP was measured in a firefly luciferase-based reporter assay. The cAMP production that is induced is directly proportional to the glucagon or GLP-1 binding to its receptor. HEK293 cells co-transfected with the glucagon or GLP-1 receptor, respectively, and luciferase gene linked to a cAMP responsive element were employed for the bioassay.

[1680] The cells were serum-deprived by culturing 16 hours in Dulbecco Minimum Essential Medium (Invitrogen, Carlsbad, Calif.) supplemented with 0.25% Bovine Growth Serum (HyClone, Logan, Utah) and then incubated with serial dilutions of either GLP-1 analogs or prodrugs for 5 hours at 37° C., 5% CO₂ in 96 well poly-D-Lysine-coated “Biocoat” plates (BD Biosciences, San Jose, Calif.). At the end of the incubation, 100 μL of LucLite luminescence substrate reagent (Perkin Elmer, Wellesley, Mass.) were added to each well. The plate was shaken briefly, incubated 10 min in the dark and light output was measured on MicroBeta-1450 liquid scintillation counter (Perkin-Elmer, Wellesley, Mass.). The effective 50% concentrations (EC₅₀) were calculated by using Origin software (OriginLab, Northampton, Mass.).

### Example 3

### Bioactivity of Glucagon Related Peptide Amide-Based Prodrugs

[1681] I) GLP-1 Analogs

(Peptide D)

(SEQ ID NO: 3292)

FAibEGTFTSDF(NH2)SIYLDKQAAAibEFVNWLLAGGPSSGAPPPS
(Peptide E)

(SEQ ID NO: 3325)

FAibEGTFTSDKSIYLDKQAAAibEFVNWLLAGGPSSGAPPPS

[1682] The above peptide sequences were assembled using solid-phase peptide synthesis. After the coupling and deprotection of the last residue His, the peptide bound resin was reacted with 5-fold excess Boc-sarcosine, DEPBT and DIEA in DMF, at room temperature for 6 h. The reaction was monitored by the nihydrin test. After completion of the coupling, the resin was washed 3 times with DMF and DCM, accordingly. The Boc protection was removed by TFA. The resin was washed by DCM, DMF and neutralized by DIEA. The resin-bound peptide was further reacted with 5-fold diBoc-dLys, DEPBT and DIEA, at room temperature overnight. The resin was then treated by TFA to remove the Boc protection and washed by DCM, DMF. Finally, the resin was treated with 20% piperidine in DMF to remove the formyl group on ²⁵Trp and dried under vacuum. The peptide was eventually cleaved by reaction with HF at 4° C. for 1 hour and precipitated by anhydrous ethyl ether. After filtration, the peptide was taken up by 20% acetonitrile (MeCN) in water and lyophilized to powder. The peptide was purified by preparative HPLC (C5 column; flow rate 10 ml/min; Buffer A 10% MeCN and 0.1% TFA in water; Buffer B: 0.1% TFA in ACN; A linear gradient B % from 0-40% (0-80 min)). The compounds were verified by ESI-MS.

[1683] II) Adding Acylated Dipeptides to the Side Chain of Residue 10 of GLP

[1684] (d)Lysine-sarcosine dipeptides [(d)lysine is the ‘A’ amino acid of structure A-B and sarcosine is the ‘B’ amino acid] were covalently attached to the 4-amino group of phenylalanine at position 10 or the epsilon amino group of Lysine at position 10. A C₁₈ acyl group was covalently attached to the epsilon amino group of (d)Lysine. The scheme for synthesizing these is shown in FIG. 1.

[1685] III) Half-Life of Peptide Prodrugs in PBS and Plasma

[1686] The peptides described above were incubated in PBS buffer or serum at 37° C. for up to 8 days. Samples were collected at different time points for PBS and plasma and half-life was determined. The half-life of Peptide D was determined to be about 1 day in both PBS and plasma (determined using methods disclosed in WO/2011/163012, incorporated by reference). The half-life of Peptide E was determined to be about 1 week in both PBS and plasma. Accordingly, the half-life of the peptide differed significantly depending on whether the dipeptide prodrug was linked to the side chain of 4-amino phenylalanine (i.e., Peptide D) or lysine (i.e., Peptide E).

### Example 4

### In Vivo Effects of Glucagon Superfamily Peptide Acylated Prodrugs in Mice

[1687] The Peptide D prodrug described in Example 3 was tested for its in vivo effects in diet induced obesity (DIO) mice (strain: C57B16). Nine groups of eight mice (with an initial average body weight of 50 g) were subcutaneously injected with vehicle only or 10 nmol/kg or 50 nmol/kg of a Peptide D acylated prodrug of Example 3, the parent peptide (i.e., Peptide D lacking an acylated dipeptide prodrug moiety), Peptide D with an acylated lysine residue linked directly the 4-amino phenylalanine at position 10, or the following peptide: YAibEGTFTSDK(γEγE-C₁₆)SIYLDKQAAAibEFVNWLLAGGPSSGAPPPS (SEQ ID NO: 3082) (Peptide F). The mice were 6 months old and had been on a high fat diet for approximately 2 months. Body weight was monitored for a week following injection and was measured on Day 0, 1, 2, and 5, wherein Day 0 was the day of injection (FIG. 2).

[1688] At the lower dose, the body weight of the mice receiving the Peptide D parent peptide declined through day 1, but returned close to the starting weight by day 5. Also at the lower dose, the acylated dK-Sar-containing prodrug caused a decline in weight through day 2 before weight began to increase slightly, reflecting the prolonged action of the prodrug version of Peptide D. All peptides caused significant weight loss throughout the time course at the higher doses.

### Example 5

### Effect of Increased Acyl Chain Length

[1689] Peptide D was synthesized as described in Example 3. (d)Lysine-sarcosine dipeptides were covalently attached to the 4-amino group of phenylalanine at position 10, and C₂₀ or C₂₂ acyl groups were covalently attached to the epsilon amino group of (d)Lysine. Similar non-prodrug versions of these peptides were also synthesized by covalently attaching a C₂₀- or C₂₂-acylated lysine directly to the 4-amino group of phenylalanine at position 10.

[1690] The half-life of Peptide D with a C₂₀ acylated (d)Lysine-sarcosine dipeptide was determined to be about 1 day in PBS.

[1691] To explore the possible formation of DKP and simultaneous regeneration of the parent drug, the above-mentioned peptides were incubated in 20% human plasma at 37° C. for approximately 5 days. Samples were collected at different time points (0, 1, 2, and 5 days). To investigate the restored activity of GLP-1 after cleavage of the dipeptide prodrug through DKP formation, all the collected samples were analyzed using a bioassay. More particularly, the receptor binding activity of GLP prodrugs were determined in the GLP-receptor Luciferase assay described in Example 2.

TABLE 10
Bioassay data at different time points in plasma (Relative activity to GLP-1 standard)

| | | | C22 attached | | C20 attached |
|---|---|---|---|---|---|
| | | C22 attached to | directly to | C20 attached to | directly to |
| | Parent peptide | position 10 | position 10 | position 10 | position 10 |
| | (Peptide D) | (via A-B prodrug) | (non-prodrug) | (via A-B prodrug) | (non-prodrug) |
| 0 d | 85.2% | 30.9% | 1.8% | 30.9% | 3.4% |
| | | Restored 36% | | Restored 36% | |
| 1 d | 84.1% | 48.2% | 2.1% | 37.8% | 0.7% |
| | | Restored 57% | | Restored 45% | |
| 5 d | 72.8% | 63.2% | 0.4% | 96.9% | 0.2% |
| | | Restored 87% | | Restored 133% | |
| | No change | Activity Restored | No change | Activity Restored | No change |

[1692] The Peptide D variants described above were also tested for their in vivo effects in diet induced obesity (DIO) mice (strain: C57B16). Nine groups of eight mice (with an initial average body weight of 50 g) were subcutaneously injected with vehicle only, or 10 nmol/kg of a Peptide D with C₁₈ acylation via the dipeptide prodrug moiety (as described in Example 3), the parent peptide (i.e., Peptide D lacking acylation and lacking a dipeptide prodrug moiety), Peptide D with a C₁₈ acyl group linked directly to the 4-amino phenylalanine at position 10, a Peptide D with C₂₀ acylation via the dipeptide prodrug moiety, Peptide D with a C₂₀ acyl group linked directly to the 4-amino phenylalanine at position 10, a Peptide D with C₂₂ acylation via the dipeptide prodrug moiety, and Peptide D with a C₂₂ acyl group linked directly to the 4-amino phenylalanine at position 10. The mice were 6 months old and had been on a high fat diet for approximately 2 months. Body weight was monitored for a week following injection and was measured on Day 0, 1, 2, 5, and 7 wherein Day 0 was the day of injection (FIG. 3A, 3B).

[1693] As in Example 4, the body weight of the mice receiving the parent peptide declined through day 1, but returned toward the starting weight by day 7. The C18 acylated prodrug version of Peptide D caused the most weight loss. These mice also largely sustained the weight loss over the time course tested.

### Example 6

### In Vivo Effects of Daily Prodrug Injection in Mice

[1694] C₂₂ acylated versions of Peptide D were also tested for their in vivo effects in diet induced obesity (DIO) mice (strain: C57B16) following daily administrations. Nine groups of eight mice (with an initial average body weight of 65 g) were subcutaneously injected daily for 5 days with vehicle only or 3 nmol/kg or 10 nmol/kg of Peptide D (parent peptide), a Peptide D with C₂₂ acylation via the prodrug dipeptide moiety and Peptide D with a C₂₂ acyl group linked directly to the 4-amino phenylalanine at position 10. The mice were 11 months old and had been on a high fat diet for approximately 2 months. Body weight was monitored for a week following injection and was measured on Day 0, 1, 2, 3, 4 and 7, wherein Day 0 was the day of injection (FIG. 4A, 4B).

[1695] At lower doses, all peptides caused steady weight loss during the daily injection time course (i.e., through day 4). After day 4, mice receiving 3 nmol/kg of all peptides returned toward the starting weight by day 7. Through day 4, the higher dose of the C₂₂ acylated prodrug of Peptide D caused the most weight loss and behaved similarly to the higher dose of the parent peptide. After the last injection on day 4, however, the mice receiving the parent peptide began gaining weight while the mice receiving the C₂₂ acylated prodrug of Peptide D continued to lose weight through day 7, reflecting the prolonged activity of the prodrug.

### Example 7

### In Vivo Effects of Alternate Prodrug Injection Schemes in Mice

[1696] C₂₂ acylated versions of Peptide D were also tested for their in vivo effects in diet induced obese (DIO) mice (strain: C57B16) following alternative administration schedules. Two groups of eight mice (with an initial average body weight of 65 g) were subcutaneously injected once with 40 nmol/kg of Peptide D (parent peptide without acylation and without a dipeptide prodrug moiety), or 40 nmol/kg of a Peptide D with C₂₂ acylation via the dipetide prodrug moiety. Three groups of eight mice were subcutaneously injected twice (1 day between injections, e.g., Monday-Wednesday) with vehicle only, 20 nmol/kg of Peptide D (parent peptide), or 20 nmol/kg of a Peptide D C₂₂ acylated prodrug. Finally, three groups of eight mice were subcutaneously injected daily for four days with vehicle only, 10 nmol/kg of Peptide D (parent peptide), or 10 nmol/kg of a Peptide D C₂₂ acylated prodrug.

[1697] Results are depicted in FIG. 5. All three administration schemes led to more total and sustained weight loss for the C₂₂ acylated prodrug version of Peptide D as compared to the parent peptide, confirming the utility of administering a peptide with an extended half-life.

### Example 8

### Bioactivity of Glucagon Related Peptide Amide-Based Prodrugs

[1698] The following peptides were synthesized:

(Peptide F)

(SEQ ID NO: 3326)

YAibEGTFTSDYSKYLDKQAAAibEFVNWLLAGGPSSGAPPPS
(Peptide G)

(SEQ ID NO: 3327)

YAibEGTFTSDYSIYLDKQAAAibEFVNWLLAGGPSSGAPPPS
(Peptide H)

(SEQ ID NO: 3328)

YAibEGTFTSDYSIYLDKQAAAibEFVNWLLAGGPSSGAPPPSK

[1699] (d)Lysine-sarcosine dipeptides were covalently attached to the 4-amino group of the epsilon amino group of Lysine at position 12 (Peptide F), position 16 (Peptide G), or position 40 (Peptide H). A C₂₂ acyl group was covalently attached to the epsilon amino group of the (d)Lysine residues.

[1700] The peptides described above were incubated in PBS buffer or serum at 37° C. for up to 8 days. Samples were collected at different time points for PBS and plasma and half-life was determined. The half-life of Peptide F was determined to be less than 24 hours in plasma. The half-life of Peptide G was determined to be greater than 1 week in both PBS and plasma. The half-life of Peptide H was determined to be about 5 days in both PBS and plasma. The shorter half-life seen when the acylated dipeptide was linked to lysine at position 12 might be due to a conformational change that facilitates cleavage when bound to plasma or alternatively to reduced detection of the acylated form when bound to plasma.

[1701] All of peptides F, G and H retained their GIP and GLP activity (percentage shown relative to activity of native GLP or GIP), as shown in the Table below.

TABLE 11
Bioassay data (Relative activity to GLP-1 or GIP standard)

| | Peptide F | Peptide G | Peptide H |
|---|---|---|---|
| EC50-GLP | 17.4% | 24.7% | 37.1% |
| EC50-GIP | 30.2% | 58.5% | 81.6% |

### Example 9

### In Vivo Effects of Acylated Prodrugs in Primates

[1702] The in vivo effects of a peptide disclosed herein, for example, the peptides in Example 8 (F, G and H) are confirmed in an obese primate (e.g., rhesus monkeys) model by administering twice a week or once weekly for 21 days a vehicle control, a parent peptide control, and an acylated prodrug peptide of Examples 3-6 or 8. The peptides are administered at a dose of 1 μg/kg to 50 μg/kg s.c. All peptides are tested for their in vivo half-lives according to methods known in the art. Body weight and food intake are also measured. Peptides with longer half-lives in plasma are expected to exhibit prolonged half-lives in vivo and generate prolonged weight loss in vivo.

1. A prodrug comprising the structure:
A-B-Q;
wherein Q is a glucagon superfamily peptide;
A is an amino acid covalently linked to a C₁₆-C₃₀ acyl group or a C₁₆-C₃₀ alkyl group; and
B is an N-alkylated amino acid linked to Q through an amide bond between A-B and a residue of Q comprising a (C₁-C₈ alkyl)NH₂ side chain, wherein the cleavage half-life of A-B from Q in serum under physiological conditions is about 3 days to about 10 days.

2. (canceled)

3. The prodrug of claim 1, wherein the residue of Q comprising a (C₁-C₈ alkyl)NH₂ side chain is located at a position corresponding to position 1, 10, 11, 12, 13, 14, 15, 16, 17, 18, 19, 20, 28, or 29 of native glucagon (SEQ ID NO: 701), or at one of the last 5 amino acids at the C-terminus of Q.

4. The prodrug of claim 3, wherein A-B comprises the structure: [chemical structure]
wherein
R₁ and R₂ are independently selected from the group consisting of H, C₁-C₁₈ alkyl, C₂-C₁₈ alkenyl, (C₁-C₁₈ alkyl)OR₉, (C₁-C₁₈ alkyl)SR₉, (C₂-C₃ alkyl)SCH₃, (C₁-C₄ alkyl)CONHR₉, (C₁-C₄ alkyl)COOR₉, (C₁-C₄ alkyl)NHR₉, (C₁-C₄ alkyl)NHC(NH₂⁺)NH₂, (C₀-C₄ alkyl)(C₃-C₆ cycloalkyl), (C₀-C₄ alkyl)(C₂-C₅ heterocyclic), (C₀-C₄ alkyl)(C₆-C₁₀ aryl)R₇, (C₁-C₄ alkyl)(C₃-C₉ heteroaryl), and C₁-C₁₂ alkyl(W₁)C₁-C₁₂ alkyl, wherein W₁ is a heteroatom selected from the group consisting of N, S and O, or R₁ and R₂ together with the atoms to which they are attached form a C₃-C₁₂ cycloalkyl or aryl;
R₄ and R₈ are independently selected from the group consisting of H, C₁-C₁₈ alkyl, C₂-C₁₈ alkenyl, (C₁-C₁₈ alkyl)OH, (C₁-C₁₈ alkyl)SH, (C₂-C₃ alkyl)SCH₃, (C₁-C₄ alkyl)CONH₂, (C₁-C₄ alkyl)COOH, (C₁-C₄ alkyl)NH₂, (C₁-C₄ alkyl)NHC(NH₂⁺)NH₂, (C₀-C₄ alkyl)(C₃-C₆ cycloalkyl), (C₀-C₄ alkyl)(C₂-C₅ heterocyclic), (C₀-C₄ alkyl)(C₆-C₁₀ aryl)R₇, (C₁-C₄ alkyl)(C₃-C₉ heteroaryl), and C₁-C₁₂ alkyl(W₁)C₁-C₁₂ alkyl, wherein W₁ is a heteroatom selected from the group consisting of N, S and O, or R₄ and R₈ together with the atoms to which they are attached form a C₃-C₆ cycloalkyl;
R₃ is C₁-C₁₈ alkyl or R₄ and R₃ together with the atoms to which they are attached form a 4, 5 or 6 member heterocyclic ring;
R₅ is NHR₆ or NHR₉;
R₆ is H, C₁-C₈ alkyl or R₆ and R₂ together with the atoms to which they are attached form a 4, 5 or 6 member heterocyclic ring;
R₇ is selected from the group consisting of H, OR₉, C₁-C₁₈ alkyl, C₂-C₁₈ alkenyl, (C₀-C₄ alkyl)CONHR₉, (C₀-C₄ alkyl)COOR₉, (C₀-C₄ alkyl)NHR₉, (C₀-C₄ alkyl)OR₉, and halo; and
R₉ is selected from the group consisting of H, C₁₆-C₃₀ acyl, and C₁₆-C₃₀ alkyl.

5. The prodrug of claim 4, wherein
R₁ and R₈ are independently H or C₁-C₈ alkyl;
R₂ is selected from the group consisting of H, C₁-C₈ alkyl, C₂-C₈ alkenyl, (C₁-C₄ alkyl)OR₉, (C₁-C₄ alkyl)SR₉, (C₂-C₃ alkyl)SCH₃, (C₁-C₄ alkyl)CONHR₉, (C₁-C₄ alkyl)COOR₉, (C₁-C₄ alkyl)NHR₉, (C₁-C₄ alkyl)NHC(NH₂⁺)NH₂, (C₀-C₄ alkyl)(C₃-C₆ cycloalkyl), (C₀-C₄ alkyl)(C₂-C₅ heterocyclic), (C₀-C₄ alkyl)(C₆-C₁₀ aryl)R₇, (C₁-C₄ alkyl)(C₃-C₉ heteroaryl), and C₁-C₁₂ alkyl(W₁)C₁-C₁₂ alkyl, wherein W₁ is a heteroatom selected from the group consisting of N, S and O, or R₁ and R₂ together with the atoms to which they are attached form a C₃-C₁₂ cycloalkyl or aryl;
R₃ is C₁-C₈ alkyl or R₄ and R₃ together with the atoms to which they are attached form a 4, 5 or 6 member heterocyclic ring and
R₅ is NHR₆.

6-10. (canceled)

11. The prodrug of claim 4, wherein
R₅ is NHR₆.

12. The prodrug of claim 4, wherein
R₁, R₄ and R₈ are independently selected from the group consisting of H and C₁-C₁₈ alkyl, or R₄ and R₈ together with the atoms to which they are attached form a C₃-C₆ cycloalkyl;
R₂ is selected from the group consisting of (C₁-C₁₈ alkyl)OR₉, (C₁-C₁₈ alkyl)SR₉, (C₁-C₄ alkyl)CONHR₉, (C₁-C₄ alkyl)COOR₉, (C₁-C₄ alkyl)NHR₉, and (C₀-C₄ alkyl)(C₆-C₁₀ aryl)R₇;
R₆ is H or C₁-C₈ alkyl; and
R₇ is selected from the group consisting of OR₉, (C₀-C₄ alkyl)CONHR₉, (C₀-C₄ alkyl)COOR₉, (C₀-C₄ alkyl)NHR₉, and (C₀-C₄ alkyl)OR₉.

13. The prodrug of claim 12, wherein
R₁, R₄ and R₈ are independently selected from the group consisting of H and C₁-C₈ alkyl, or R₄ and R₈ together with the atoms to which they are attached form a C₃-C₆ cycloalkyl;
R₂ is selected from the group consisting of (C₁-C₈ alkyl)OR₉, (C₁-C₈ alkyl)SR₉, (C₁-C₄ alkyl)CONHR₉, (C₁-C₄ alkyl)COOR₉, (C₁-C₄ alkyl)NHR₉, and (C₀-C₄ alkyl)(C₆-C₁₀ aryl)R₇; and
R₃ is C₁-C₈ alkyl or R₄ and R₃ together with the atoms to which they are attached form a 4, 5 or 6 member heterocyclic ring.

14. The prodrug of claim 13, wherein
R₂ is selected from the group consisting of (C₁-C₈ alkyl)OR₉, (C₁-C₈ alkyl)SR₉, and (C₁-C₄ alkyl)NHR₉; and
R₃ is C₁-C₈ alkyl or R₄ and R₃ together with the atoms to which they are attached form a 4, 5 or 6 member heterocyclic ring.

15. The prodrug of claim 12, wherein
R₂ is (C₁-C₄ alkyl)NHR₉; and
R₃ is C₁-C₈ alkyl or R₄ and R₃ together with the atoms to which they are attached form a 4, 5 or 6 member heterocyclic ring.

16. The prodrug of claim 15, wherein
R₁, R₄ and R₈ are H; and
R₃ is C₁-C₈ alkyl; and
R₉ is selected from the group consisting of C₁₆-C₃₀ acyl and C₁₆-C₃₀ alkyl.

17. (canceled)

18. The prodrug of claim 4, wherein
R₁, R₄, and R₈ are H;
R₂ is (C₁-C₄ alkyl)NHR₉;
R₃ is C₁-C₈ alkyl
R₅ is NHR₆;
R₆ is H or C₁-C₈ alkyl; and
R₉ is selected from the group consisting of C₁₆-C₃₀ acyl and C₁₆-C₃₀ alkyl, optionally C₂₀-C₂₈ acyl and C₂₀-C₂₈ alkyl.

19. (canceled)

20. The prodrug of claim 18, wherein
R₂ is (CH₂)₄NHR₉;
R₃ is CH₃;
R₅ is NH₂; and
R₉ is C₂₀-C₂₈ acyl.

21. The prodrug of claim 20, wherein
R₂ is selected from the group consisting of (CH₂)₄NHCO(CH₂)₁₆CH₃ and (CH₂)₄NHCO(CH₂)₂₀CH₃.

22-23. (canceled)

24. The prodrug of claim 1, wherein A is a D amino acid.

25-26. (canceled)

27. The prodrug of claim 1 wherein the glucagon superfamily peptide comprises
I) the amino acid sequence:
X1-X2-Gln-Gly-Thr-Phe-Thr-Ser-Asp-Tyr-Ser-Lys-Tyr-Leu-Asp-Ser-Arg-Arg-Ala-Gln-Asp-Phe-Val-Gln-Trp-Leu-Met-Z (SEQ ID NO: 839) with 1 to 3 amino acid modifications thereto,
wherein X1 and/or X2 is a non-native (relative to SEQ ID NO: 701) amino acid that reduces susceptibility of the glucagon peptide to cleavage by dipeptidyl peptidase IV (DPP-IV),
wherein Z is selected from the group consisting of —COOH, -Asn-COOH, Asn-Thr-COOH, and Y—COOH, wherein Y is 1 to 2 amino acids, and
wherein (1) a lactam bridge connects the side chains of an amino acid at position i and an amino acid at position i+4, wherein i is 12, 16, 20 or 24 or (2) one, two, three, or all of the amino acids at positions 16, 20, 21, and 24 of the glucagon peptide is substituted with an α, α-disubstituted amino acid;
and wherein Q exhibits glucagon agonist activity; or
II) the amino acid sequence of SEQ ID NO: 701 and comprises:
at least one amino acid modification selected from the group consisting of:
substitution of Asn at position 28 with a charged amino acid;
substitution of Asn at position 28 with a charged amino acid selected from the group consisting of Lys, Arg, His, Asp, Glu, cysteic acid, and homocysteic acid;
substitution at position 28 with Asn, Asp, or Glu;
substitution at position 28 with Asp;
substitution at position 28 with Glu;
substitution of Thr at position 29 with a charged amino acid;
substitution of Thr at position 29 with a charged amino acid selected from the group consisting of Lys, Arg, His, Asp, Glu, cysteic acid, and homocysteic acid;
substitution at position 29 with Asp, Glu, or Lys;
substitution at position 29 with Glu;
insertion of 1-3 charged amino acids after position 29;
insertion after position 29 of Glu or Lys;
insertion after position 29 of Gly-Lys or Lys-Lys; or a combination thereof;
and at least one amino acid modification selected from Group A or Group B, or a combination thereof;
wherein Group A is an amino acid modification selected from the group consisting of substitution of Asp at position 15 with Glu, and substitution of Ser at position 16 with Thr or AIB; and
wherein Group B is an amino acid modification selected from the group consisting of:
substitution of His at position 1 with a non-native amino acid that reduces susceptibility of the glucagon peptide to cleavage by dipeptidyl peptidase IV (DPP-IV),
substitution of Ser at position 2 with a non-native amino acid that reduces susceptibility of the glucagon peptide to cleavage by dipeptidyl peptidase IV (DPP-IV),
substitution of Tyr at position 10 with Phe or Val;
substitution of Lys at position 12 with Arg;
substitution of Gln at position 20 with Ala or AIB;
substitution of Asp at position 21 with Glu;
substitution of Gln at position 24 with Ala or AIB;
substitution of Met at position 27 with Leu or Nle;
deletion of amino acids at positions 27-29;
deletion of amino acids at positions 28-29;
deletion of the amino acid at positions 29;
or a combination thereof;
and wherein Q exhibits glucagon agonist activity; or
III) a glucagon related peptide of SEQ ID NO: 701, with the following modifications:
(a) an amino acid modification at position 1 that confers GIP agonist activity,
(b) (1) a lactam bridge between the side chains of amino acids at positions i and i+4 or between the side chains of amino acids at positions j and j+3, wherein i is 12, 13, 16, 17, 20 or 24, and wherein j is 17, or (2) one, two, three, or all of the amino acids at positions 16, 20, 21, and 24 of the analog is substituted with an α,α-disubstituted amino acid,
(c) amino acid modifications at one, two or all of positions 27, 28 and 29, and
(d) 1-6 further amino acid modifications,
wherein the EC50 of the analog for GIP receptor activation is about 10 nM or less; or
IV) the sequence of SEQ ID NO: 55 or an analog of SEQ ID NO: 55, wherein said analog differs from SEQ ID NO: 55 by 1 to 3 amino acid modifications, selected from positions 1, 2, 3, 5, 7, 10, 11, 13, 14, 17, 18, 19, 21, 24, 27, 28, and 29, wherein said glucagon peptide exhibits at least 20% of the activity of native GLP-1 at the GLP-1 receptor; or
V) an amino acid that differs from SEQ ID NO: 701 by no more than ten amino acid modifications, comprising one or more amino acid substitutions with AIB at positions 16, 20, 21, and/or 24, and an amino acid modification at position 1 and/or 2 that provides reduced susceptibility to cleavage by dipeptidyl peptidase IV, wherein said glucagon peptide exhibits at least 20% of the activity of native GLP-1 at the GLP-1 receptor; or
VI) the sequence of SEQ ID NO: 1342, or an oxy derivative thereof and wherein 0 exhibits glucagon antagonist activity; or
VII) a sequence having the general structure of A-B-C, wherein A is selected from the group consisting of:
(i) phenyl lactic acid (PLA);
(ii) an oxy derivative of PLA;
(iii) a peptide of 2 to 6 amino acids in which two consecutive amino acids of the peptide are linked via an ester or ether bond;
B represents amino acids i to 26 of SEQ ID NO: 701, wherein i is 3, 4, 5, 6, or 7, optionally comprising one or more amino acid modifications selected from the group consisting of:
(iv) Asp at position 9 (according to the amino acid numbering of SEQ ID NO: 701) is substituted with a Glu, a sulfonic acid derivative of Cys, homoglutamic acid, β-homoglutamic acid, or an alkylcarboxylate derivative of cysteine having the structure of: [chemical structure]
wherein X₅ is C₁-C₄ alkyl, C₂-C₄ alkenyl, or C₂-C₄ alkynyl.
(v) substitution of one or two amino acids at positions 10, 20, and 24, (according to the amino acid numbering of SEQ ID NO: 701) with an amino acid covalently attached to an acyl or alkyl group via an ester, ether, thioether, amide, or alkyl amine linkage;
(vi) substitution of one or two amino acids at positions 16, 17, 20, 21, and 24 (according to the amino acid numbering of SEQ ID NO: 701) with an amino acid selected from the group consisting of: Cys, Lys, ornithine, homocysteine, and acetyl-phenylalanine (Ac-Phe), wherein the amino acid of the group is covalently attached to a hydrophilic moiety;
(vii) Asp at position 15 (according to the numbering of SEQ ID NO: 701) is substituted with cysteic acid, glutamic acid, homoglutamic acid, and homocysteic acid;
(viii) Ser at position 16 (according to the numbering of SEQ ID NO: 701) is substituted with cysteic acid, glutamic acid, homoglutamic acid, and homocysteic acid;
(ix) substitution with AIB at one or more of positions 16, 20, 21, and 24 according to the amino acid numbering of SEQ ID NO: 701;
and C is selected from the group consisting of:
(x) X;
(xi) X-Y;
(xii) X-Y-Z; and
(xiii) X-Y-Z-R10,
wherein X is Met, Leu, or Nle; Y is Asn or a charged amino acid; Z is Thr, Gly, Cys, Lys, ornithine (Orn), homocysteine, acetyl phenylalanine (Ac-Phe), or a charged amino acid; wherein R10 is selected from a group consisting of SEQ ID NOs: 1319-1321 and 1353; and
(xiv) any of (x) to (xiii) in which the C-terminal carboxylate is replaced with an amide;
and wherein Q exhibits glucagon antagonist activity; or
VIII) the sequence of SEQ ID NO: 1451, wherein the amino acids at positions 4 and 7, positions 7 and 11, positions 11 and 15, positions 15 and 19, or positions 19 and 23 of SEQ ID NO: 1451 are linked via a lactam bridge, or an oxy derivative and wherein Q exhibits glucagon antagonist activity and GLP-1 agonist activity; or
IX) a peptide comprising (1) an intramolecular bridge, or an alpha, alpha-di-substituted amino acid, or an acidic amino acid at position 16 (according to the numbering of SEQ ID NO: 701), or a combination thereof, (2) a C-terminal amide or ester in place of a C-terminal carboxylate, and (3) a general structure of A-B-C,
wherein A is selected from the group consisting of
(i) PLA;
(ii) an oxy derivative of PLA; and
(iii) a peptide of 2 to 6 amino acids in which two consecutive amino acids of the peptide are linked via an ester or ether bond;
wherein B represents amino acids p to 26 of SEQ ID NO: 701, wherein p is 3, 4, 5, 6, or 7, optionally comprising one or more amino acid modifications selected from the group consisting of:
(iv) Asp at position 9 (according to the amino acid numbering of SEQ ID NO: 701) is substituted with a Glu, a sulfonic acid derivative of Cys, homoglutamic acid, β-homoglutamic acid, or an alkylcarboxylate derivative of cysteine having the structure of: [chemical structure]
wherein X₅ is C₁-C₄ alkyl, C₂-C₄ alkenyl, or C₂-C₄ alkynyl;
(v) substitution of one or two amino acids at positions 10, 20, and 24, (according to the amino acid numbering of SEQ ID NO: 701) with an amino acid covalently attached to an acyl or alkyl group via an ester, ether, thioether, amide, or alkyl amine linkage;
(vi) substitution of one or two amino acids at positions 16, 17, 20, 21, and 24 (according to the amino acid numbering of SEQ ID NO: 701) with an amino acid selected from the group consisting of: Cys, Lys, ornithine, homocysteine, and acetyl-phenylalanine (Ac-Phe), wherein the amino acid of the group is covalently attached to a hydrophilic moiety;
(vii) Asp at position 15 (according to the numbering of SEQ ID NO: 701) is substituted with cysteic acid, glutamic acid, homoglutamic acid, and homocysteic acid;
(viii) Ser at position 16 (according to the numbering of SEQ ID NO: 701) is substituted with cysteic acid, glutamic acid, homoglutamic acid, and homocysteic acid;
(ix) Arg at position 17 is replaced with Gln, Arg at position 18 is replaced with Ala, Asp at position 21 is replaced with Glu, Val at position 23 is replaced with Ile, and Gln at position 24 is replaced with Ala (according to amino acid numbering of SEQ ID NO: 701);
(x) Ser at position 16 is replaced with Glu, Gln at position 20 is replaced with Glu, or Gln at position 24 is replaced with Glu (according to the amino acid numbering of SEQ ID NO: 701);
wherein C is selected from the group consisting of:
(vii) X;
(viii) X-Y;
(ix) X-Y-Z;
(x) X-Y-Z-R10;
wherein X is Met, Leu, or Nle; Y is Asn or a charged amino acid; Z is Thr, Gly, Cys, Lys, ornithine (Orn), homocysteine, acetyl phenylalanine (Ac-Phe), or a charged amino acid; wherein R10 is selected from a group consisting of SEQ ID NOs: 1421, 1426, 1427, and 1450;
and wherein Q exhibits glucagon antagonist activity and GLP-1 agonist activity; or
X) a peptide consisting of SEQ ID NOs: 1-564, 566-570, 573-575, 577, 579-580, 585-612, 616, 618-632, 634-642, 647, 657-684, 701-732, 801-878, 883-919, 1001-1262, 1301-1371, 1401-1518, 1701-1708, 1710, 1711, 1731-1734, 1738, 1740, 1741, 1745, 1747-1776, and 3325-3328.

28-37. (canceled)

38. A sterile pharmaceutical composition comprising the prodrug of claim 1, and a pharmaceutically acceptable carrier.

39. A method of treating hyperglycemia or diabetes, said method comprising administering an effective amount of a pharmaceutical composition of claim 38.

40. A method of suppressing appetite, reducing weight gain or inducing weight loss, said method comprising administering an effective amount of a pharmaceutical composition of claim 38.

41. The pharmaceutical of claim 38 further comprising a second therapeutic agent wherein
i) the second therapeutic is insulin, leptin, Peptide YY (PYY), Pancreatic Peptide (PP), fibroblast growth factor 21 (FGF21), a Y2Y4 receptor agonists, a sulfonylurea, tolbutamide (Orinase), acetohexamide (Dymelor), tolazamide (Tolinase), chlorpropamide (Diabinese), glipizide (Glucotrol), glyburide (Diabeta, Micronase, Glynase), glimepiride (Amaryl), gliclazide (Diamicron), a meglitinide, repaglinide (Prandin), nateglinide (Starlix), a biguanide, metformin (Glucophage), phenformin, a thiazolidinedione, rosiglitazone (Avandia), pioglitazone (Actos), troglitazone (Rezulin), a PPARγ inhibitor, an alpha glucosidase inhibitors that inhibits carbohydrate digestion, miglitol (Glyset), acarbose (Precose/Glucobay), exenatide (Byetta), pramlintide, a Dipeptidyl peptidase-4 (DPP-4) inhibitor, vildagliptin, sitagliptin, a SGLT (sodium-dependent glucose transporter 1) inhibitor, a glucokinase activator (GKA), a glucagon receptor antagonist (GRA), or an FBPase (fructose 1,6-bisphosphatase) inhibitor; or
ii) the second therapeutic is phentermine, diethylpropion (Tenuate®), phendimetrazine (Prelu-2®, Bontril®), benzphetamine (Didrex®), sibutramine (Meridia®, Reductil®), rimonabant (Acomplia®), oxyntomodulin, fluoxetine hydrochloride (Prozac), Qnexa (topiramate and phentermine), Excalia (bupropion and zonisamide), Contrave (bupropion and naltrexone), XENICAL (Orlistat), Cetilistat, or GT 389-255.

42-44. (canceled)

45. The peptide prodrug of claim 1 comprising any one of SEQ ID NOs: 3272-3292, 3298-3300, 3305-3316, 3329-3337.

46-50. (canceled)

The application's sequence listing, which the Patent Office published only in electronic form, follows.

SEQUENCE LISTING (3337 sequences)

SEQ ID NO: 1 - protein, 29 aa, Homo sapiens
HSQGTFTSDYSKYLDSRRAQDFVQWLMNT

SEQ ID NO: 2 - protein, 29 aa, Artificial Sequence
  Synthetic Glucagon Analogue
  MOD_RES (16)..(16): Glu, Gln, homoglutamic acid or homocysteic acid
  MOD_RES (17)..(17): Arg, Cys, Orn, homocysteine or acetyl phenylalanine
  MOD_RES (27)..(27): Met, Leu or Nle
HSQGTFTSDYSKYLDXXRAQDFVQWLXNT

SEQ ID NO: 3 - protein, 29 aa, Artificial Sequence
  Synthetic Glucagon Analogue
  MOD_RES (16)..(16): Glu, Gln, homoglutamic acid or homocysteic acid
  MOD_RES (21)..(21): Asp, Cys, Orn, homocysteine or acetyl phenyalanine
  MOD_RES (27)..(27): Met, Leu or Nle
HSQGTFTSDYSKYLDXRRAQXFVQWLXNT

SEQ ID NO: 4 - protein, 29 aa, Artificial Sequence
  Synthetic Glucagon Analogue
  MOD_RES (16)..(16): Glu, Gln, homoglutamic acid or homocysteic acid
  MOD_RES (24)..(24): Gln, Cys, Orn, homocysteine or acetyl phenylalanine
  MOD_RES (27)..(27): Met, Leu or Nle
HSQGTFTSDYSKYLDXRRAQDFVXWLXNT

SEQ ID NO: 5 - protein, 29 aa, Artificial Sequence
  Synthetic Glucagon Analogue
  MOD_RES (16)..(16): Glu, Gln, homoglutamic acid or homocysteic acid
  MOD_RES (21)..(21): Asp, Cys, Orn, homocysteine or acetyl phenyalanine
  MOD_RES (24)..(24): Gln, Cys, Orn, homocysteine or acetyl phenyalanine
  MOD_RES (27)..(27): Met, Leu or Nle
HSQGTFTSDYSKYLDXRRAQXFVXWLXNT

SEQ ID NO: 6 - protein, 29 aa, Artificial Sequence
  Synthetic Glucagon Analogue
  MOD_RES (21)..(21): Asp, Cys, Orn, homocysteine or acetyl phenyalanine
  MOD_RES (27)..(27): Met, Leu or Nle
HSQGTFTSDYSKYLDERRAQXFVQWLXNT

SEQ ID NO: 7 - protein, 29 aa, Artificial Sequence
  Synthetic Glucagon Analogue
  MOD_RES (24)..(24): Gln, Cys, Orn, homocysteine or acetyl phenylalanine
  MOD_RES (27)..(27): Met, Leu or Nle
HSQGTFTSDYSKYLDERRAQDFVXWLXNT

SEQ ID NO: 8 - protein, 29 aa, Artificial Sequence
  Synthetic Glucagon Analogue
  MOD_RES (16)..(16): Glu, Gln, homoglutamic acid or homocysteic acid
HSQGTFTSDYSKYLDXRRAQDFVQWLMNT

SEQ ID NO: 9 - protein, 29 aa, Artificial Sequence
  Synthetic Glucagon Analogue
  MOD_RES (27)..(27): Met, Leu or Nle
HSQGTFTSDYSKYLDERRAQDFVQWLXNT

SEQ ID NO: 10 - protein, 29 aa, Artificial Sequence
  Synthetic Glucagon Analogue
HSQGTFTSDYSKYLDERRAQDFVQWLMNT

SEQ ID NO: 11 - protein, 29 aa, Artificial Sequence
  Synthetic Glucagon Analogue
  MISC_FEATURE: c-term amidation
HSQGTFTSDYSKYLDERRAQDFVQWLMNT

SEQ ID NO: 12 - protein, 29 aa, Artificial Sequence
  Synthetic Glucagon Analogue
  MISC_FEATURE (12)..(16): Lactam ring between side chains at position 12 and 16
HSQGTFTSDYSKYLDERRAQDFVQWLMNT

SEQ ID NO: 13 - protein, 29 aa, Artificial Sequence
  Synthetic Glucagon Analogue
  MISC_FEATURE (16)..(20): Lactam ring between side chains at positions 16 and 20
HSQGTFTSDYSKYLDERRAKDFVQWLMNT

SEQ ID NO: 14 - protein, 29 aa, Artificial Sequence
  Synthetic Glucagon Analogue
  MISC_FEATURE (22)..(24): Lactam ring between side chains at positions 22 and 24
HSQGTFTSDYSKYLDSRRAKDFVEWLMNT

SEQ ID NO: 15 - protein, 29 aa, Artificial Sequence
  Synthetic Glucagon Analogue
  MISC_FEATURE (24)..(28): Lactam ring formed between side chains at positions 24 and 28
HSQGTFTSDYSKYLDSRRAQDFVEWLMKT

SEQ ID NO: 16 - protein, 29 aa, Artificial Sequence
  Synthetic Glucagon Analogue
  MISC_FEATURE (12)..(16): Lactam ring between side chains at positions 12 and 16
  MISC_FEATURE (20)..(24): Lactam ring between side chains at positions 20 and 24
HSQGTFTSDYSKYLDERRAKDFVEWLMNT

SEQ ID NO: 17 - protein, 29 aa, Artificial Sequence
  Synthetic Glucagon Analogue
  MISC_FEATURE (16)..(20): Lactam ring between side chains at positions 16 and 20
  MISC_FEATURE (24)..(28): Lactam ring between side chains at positions 24 and 28
HSQGTFTSDYSKYLDERRADDFVEWLMKT

SEQ ID NO: 18 - protein, 29 aa, Artificial Sequence
  Synthetic Glucagon Analogue
  MISC_FEATURE (16)..(20): Lactam ring between side chains at positions 16 and 20
HSQGTFTSDYSKYLDERRAKDFVEWLMKT

SEQ ID NO: 19 - protein, 30 aa, Artificial Sequence
  Synthetic Glucagon Analogue
  MISC_FEATURE: c-term amidation
  MOD_RES (30)..(30): Variable amino acid
HSQGTFTSDYSKYLDERRAQDFVQWLMNTX

SEQ ID NO: 20 - protein, 29 aa, Artificial Sequence
  Synthetic Glucagon Analogue
  MOD_RES (16)..(16): Ser, Glu, Gln, homoglutamic acid or homocysteic acid
  MOD_RES (20)..(20): Gln, Lys, Arg, Orn or Citrulline
  MOD_RES (24)..(24): Gln or Glu
  MOD_RES (28)..(28): Asn, Asp or Lys
  MOD_RES (29)..(29): Thr or Gly
HSQGTFTSDYSKYLDXRRAXDFVXWLMXX

SEQ ID NO: 21 - protein, 29 aa, Artificial Sequence
  Synthetic Glucagon Analogue
  MISC_FEATURE: c-term amidation
  MOD_RES (2)..(2): D-Ser, Ala, Gly, N-methyl Ser or aminoisobutyric acid
HXQGTFTSDYSKYLDERRAQDFVQWLMNT

SEQ ID NO: 22 - protein, 29 aa, Artificial Sequence
  Synthetic Glucagon Analogue
  MISC_FEATURE: c-term amidation
  MOD_RES (2)..(2): Aminoisobutyric acid
HXQGTFTSDYSKYLDERRAQDFVQWLMNT

SEQ ID NO: 23 - protein, 29 aa, Artificial Sequence
  Synthetic Glucagon Analogue
  MISC_FEATURE: c-term amidation
  MOD_RES (17)..(17): Cys-PEG
  MOD_RES (27)..(27): Met, Leu or Nle
HSQGTFTSDYSKYLDECRAQDFVQWLXNT

SEQ ID NO: 24 - protein, 29 aa, Artificial Sequence
  Synthetic Glucagon Analogue
  MISC_FEATURE: c-term amidation
  MOD_RES (21)..(21): Cys-PEG
  MOD_RES (27)..(27): Met, Leu or Nle
HSQGTFTSDYSKYLDERRAQCFVQWLXNT

SEQ ID NO: 25 - protein, 29 aa, Artificial Sequence
  Synthetic Glucagon Analogue
  MISC_FEATURE: c-term amidation
  MOD_RES (24)..(24): Cys-PEG
  MOD_RES (27)..(27): Met, Leu or Nle
HSQGTFTSDYSKYLDERRAQDFVCWLXNT

SEQ ID NO: 26 - protein, 10 aa, Artificial Sequence
  Synthetic peptide fragment representing the carboxy terminal 10 amino acids Exendin-4
GPSSGAPPPS

SEQ ID NO: 27 - protein, 8 aa, Artificial Sequence
  Synthetic peptide fragment representing the carboxy terminal 8 amino acids of oxyntomodulin
KRNRNNIA

SEQ ID NO: 28 - protein, 4 aa, Artificial Sequence
  Synthetic peptide
KRNR

SEQ ID NO: 29 - protein, 10 aa, Artificial Sequence
  Synthetic peptide fragment representing the carboxy terminal 10 amino acids of Exendin-4
  MISC_FEATURE: c-term amidation
GPSSGAPPPS

SEQ ID NO: 30 - protein, 39 aa, Artificial Sequence
  Synthetic Glucagon Analogue
  MOD_RES (27)..(27): Met, Leu or Nle
HSQGTFTSDYSKYLDERRAQDFVQWLXNTGPSSGAPPPS

SEQ ID NO: 31 - protein, 37 aa, Artificial Sequence
  Synthetic Glucagon Analogue
  MOD_RES (27)..(27): Met, Leu or Nle
HSQGTFTSDYSKYLDERRAQDFVQWLXNTKRNRNNIA

SEQ ID NO: 32 - protein, 33 aa, Artificial Sequence
  Synthetic Glucagon Analogue
  MOD_RES (27)..(27): Met, Leu or Nle
HSQGTFTSDYSKYLDERRAQDFVQWLXNTKRNR

SEQ ID NO: 33 - protein, 29 aa, Artificial Sequence
  Synthetic Glucagon Analogue
  MOD_RES (15)..(15): Asp, Glu, homoglutamic acid, cysteic acid or homocysteic acid
  MOD_RES (16)..(16): Ser, Glu, Gln, homoglutamic acid or homocysteic acid
  MOD_RES (20)..(20): Gln or Lys
  MOD_RES (24)..(24): Gln or Glu
  MOD_RES (28)..(28): Asn, Lys or an acidic amino acid
  MOD_RES (29)..(29): Thr, Gly or an acidic amino acid
HSQGTFTSDYSKYLXXRRAXDFVXWLMXX

SEQ ID NO: 34 - protein, 29 aa, Artificial Sequence
  Synthetic Glucagon Analogue
  MOD_RES (15)..(15): Asp, Glu, cysteic acid, homoglutamic acid or homocysteic acid
  MOD_RES (16)..(16): Ser, Glu, Gln, homoglutamic acid or homocysteic acid
  MOD_RES (20)..(20): Gln or Lys
  MOD_RES (24)..(24): Gln or Glu
  MOD_RES (28)..(28): Asn, Asp or Lys
  MOD_RES (29)..(29): Thr or Gly
HSQGTFTSDYSKYLDXRRAXDFVXWLMXX

SEQ ID NO: 35 - protein, 29 aa, Artificial Sequence
  Synthetic Glucagon Analogue
HSQGTFTSDYSKYLDSCRAQDFVQWLMNT

SEQ ID NO: 36 - protein, 39 aa, Artificial Sequence
  Synthetic Glucagon Analogue
HSQGTFTSDYSKYLDSRRAQDFVQWLMNTGPSSGAPPPS

SEQ ID NO: 37 - protein, 29 aa, Artificial Sequence
  Synthetic Glucagon Analogue
  MOD_RES (24)..(24): 2-butyrolactone bound through thiol group of Cys
HSQGTFTSDYSKYLDSRRAQDFVCWLMNT

SEQ ID NO: 38 - protein, 29 aa, Artificial Sequence
  Synthetic Glucagon Analogue
  MOD_RES (24)..(24): Carboxymethyl group bound through thiol group of Cys
HSQGTFTSDYSKYLDSRRAQDFVCWLMNT

SEQ ID NO: 39 - protein, 39 aa, Artificial Sequence
  Synthetic Glucagon Analogue
HSQGTFTSDYSRYLDSRRAQDFVQWLMNTGPSSGAPPPS

SEQ ID NO: 40 - protein, 29 aa, Artificial Sequence
  Synthetic Glucagon Analogue
  MISC_FEATURE: c-term amidation
  MOD_RES (15)..(15): Glu or Asp
  MOD_RES (28)..(28): Glu or Asp
HSQGTFTSDYSKYLXERRAQDFVQWLMXT

SEQ ID NO: 41 - protein, 29 aa, Artificial Sequence
  Synthetic Glucagon Analogue
  MISC_FEATURE: c-term amidation; lactam ring between side chains at positions 12 and 16
  MISC_FEATURE: c-term amidation
  MISC_FEATURE (12)..(16): Lactam ring between side chains at positions 12 and 16
  MOD_RES (15)..(15): Glu or Asp
  MOD_RES (28)..(28): Glu or Asp
HSQGTFTSDYSKYLXERRAQDFVQWLMXT

SEQ ID NO: 42 - protein, 29 aa, Artificial Sequence
  Synthetic Glucagon Analogue
  MISC_FEATURE: c-term amidation; lactam ring between side chains at positions 16 and 20
  MISC_FEATURE: c-term amidation
  MOD_RES (15)..(15): Glu or Asp
  MISC_FEATURE (16)..(20): Lactam ring between side chains at positions 16 and 20
  MOD_RES (28)..(28): Glu or Asp
HSQGTFTSDYSKYLXERRAKDFVQWLMXT

SEQ ID NO: 43 - protein, 29 aa, Artificial Sequence
  Synthetic Glucagon Analogue
  MISC_FEATURE: c-term amidation
  MOD_RES (15)..(15): Glu or Asp
  MISC_FEATURE (20)..(24): Lactam ring between side chains at positions 20 and 24
  MOD_RES (28)..(28): Glu or Asp
HSQGTFTSDYSKYLXSRRAKDFVEWLMXT

SEQ ID NO: 44 - protein, 29 aa, Artificial Sequence
  Synthetic Glucagon Analogue
  MISC_FEATURE: c-term amidation
  MOD_RES (15)..(15): Glu or Asp
  MISC_FEATURE (24)..(28): Lactam ring between side chains at positions 24 and 28
  MOD_RES (29)..(29): Glu or Thr
HSQGTFTSDYSKYLXSRRAQDFVEWLMKX

SEQ ID NO: 45 - protein, 29 aa, Artificial Sequence
  Synthetic Glucagon Analogue
  MOD_RES (12)..(12): Lys or Glu
  MOD_RES (15)..(15): Asp, Glu, homoglutamic acid, cysteic acid or homocysteic acid
  MOD_RES (16)..(16): Ser, Gln, Glu, Lys, homoglutamic acid, cysteic acid or homocysteic acid
  MOD_RES (20)..(20): Gln, Glu or Lys
  MOD_RES (24)..(24): Gln, Lys or Glu
  MOD_RES (28)..(28): Asn, Lys or an acidic amino acid
  MOD_RES (29)..(29): Thr, Gly or an acidic amino acid
HSQGTFTSDYSXYLXXRRAXDFVXWLMXX

SEQ ID NO: 46 - protein, 29 aa, Artificial Sequence
  Synthetic Glucagon Analogue
  MOD_RES (16)..(16): Ser, Glu, Gln, homoglutamic acid or homocysteic acid
  MOD_RES (20)..(20): Gln or Lys
  MOD_RES (24)..(24): Gln or Glu
HSQGTFTSDYSKYLDXRRAXDFVXWLMNT

SEQ ID NO: 47 - protein, 29 aa, Artificial Sequence
  Synthetic Glucagon Analogue
HSQGTFTSDYSKYLDERRAKDFVQWLMNT

SEQ ID NO: 48 - protein, 29 aa, Artificial Sequence
  Synthetic Glucagon Analogue
HSQGTFTSDYSKYLDSRRAKDFVEWLMNT

SEQ ID NO: 49 - protein, 29 aa, Artificial Sequence
  Synthetic Glucagon Analogue
HSQGTFTSDYSKYLDSRRAQDFVEWLMKT

SEQ ID NO: 50 - protein, 31 aa, Homo sapiens
HAEGTFTSDVSSYLEGQAAKEFIAWLVKGRG

SEQ ID NO: 51 - protein, 29 aa, Artificial Sequence
  Synthetic Glucagon Analogue
  MOD_RES (15)..(15): Asp, Glu, homoglutamic acid, cysteic acid or homocysteic acid
  MOD_RES (16)..(16): Ser, Glu, Gln, homoglutamic acid or homocysteic acid
  MOD_RES (20)..(20): Gln, Lys, Arg, Orn, or Citrulline
  MOD_RES (21)..(21): Asp, Glu, homoglutamic acid, or homocysteic acid
  MOD_RES (24)..(24): Gln or Glu
  MOD_RES (28)..(28): Asn, Lys or an acidic amino acid
  MOD_RES (29)..(29): Thr, Gly or an acidic amino acid
HSQGTFTSDYSKYLXXRRAXXFVXWLMXX

SEQ ID NO: 52 - protein, 30 aa, Artificial Sequence
  Synthetic peptide
  MISC_FEATURE: c-term amidation
HAEGTFTSDVSSYLEGQAAKEFIAWLVKGR

SEQ ID NO: 53 - protein, 29 aa, Artificial Sequence
  Synthetic Glucagon Analogue
  MOD_RES (3)..(3): Glu, Orn or Nle
  MOD_RES (15)..(15): Asp, Glu, homoglutamic acid, cysteic acid or homocysteic acid
  MOD_RES (16)..(16): Ser, Glu, Gln, homoglutamic acid or homocysteic acid
  MOD_RES (20)..(20): Gln or Lys
  MOD_RES (24)..(24): Gln or Glu
  MOD_RES (28)..(28): Asn, Lys or an acidic amino acid
  MOD_RES (29)..(29): Thr or an acidic amino acid
HSXGTFTSDYSKYLXXRRAXDFVXWLMXX

SEQ ID NO: 54 - protein, 29 aa, Artificial Sequence
  Synthetic Glucagon Analogue
  MOD_RES (17)..(17): Arg or Gln
  MOD_RES (18)..(18): Arg or Ala
  MOD_RES (21)..(21): Asp or Glu
  MOD_RES (23)..(23): Val or Ile
  MOD_RES (24)..(24): Gln or Ala
HSQGTFTSDYSKYLDEXXAKXFXXWLMNT

SEQ ID NO: 55 - protein, 29 aa, Artificial Sequence
  Synthetic Glucagon Analogue
  MOD_RES (1)..(1): His, D-His, (Des-amino)His, hydroxyl-His, acetyl-His, homo-His or alpha, alpha-dimethyl imidiazole acetic acid (DMIA), N-methyl His, alpha-methyl His, or imidazole acetic acid
  MOD_RES (2)..(2): Ser, D-Ser, Ala, D-Ala, Val, Gly, N-methyl Ser, aminoisobutyric acid (AIB) or N-methyl Ala
  MOD_RES (3)..(3): Gln, Glu, Orn or  Nle
  MOD_RES (10)..(10): Tyr or Trp
  MOD_RES (12)..(12): Lys, Citrulline, Orn or Arg
  MOD_RES (15)..(15): Asp, Glu, cysteic acid, homoglutamic acid and homocysteic acid
  MOD_RES (16)..(16): Ser, Glu, Gln, homoglutamic acid or homocysteic acid
  MOD_RES (17)..(17): Arg, Gln, Lys, Cys, Orn, homocysteine or acetyl phenylalanine
  MOD_RES (18)..(18): Arg, Ala, Lys, Cys, Orn, homocysteine or acetyl phenyalanine
  MOD_RES (20)..(20): Gln, Lys, Arg, Orn or Citrulline
  MOD_RES (21)..(21): Gln, Glu, Asp, Lys, Cys, Orn, homocystein or acetyl phenyalanine
  MOD_RES (23)..(23): Val or Ile
  MOD_RES (24)..(24): Ala, Gln, Glu, Lys, Cys, Orn, homocysteine or acetyl phenyalanine
  MOD_RES (27)..(27): Met, Leu or Nle
  MOD_RES (28)..(28): Asn, Arg, Citrulline, Orn, Lys or Asp
  MOD_RES (29)..(29): Thr, Gly, Lys, Cys, Orn, homocycsteine or acetyl phenyalanine
XXXGTFTSDXSXYLXXXXAXXFXXWLXXX

SEQ ID NO: 56 - protein, 29 aa, Artificial Sequence
  Synthetic Glucagon Analogue
  MOD_RES (1)..(1): His, D-His, (Des-amino)His, hydroxyl-His, acetyl-His, homo-His, DMIA, N-methyl His, alpha-methyl His, or imidazole acetic acid
  MOD_RES (2)..(2): Ser, D-Ser, Ala, D-Ala, Val, Gly, N-methyl Ser, AIB or N-methyl Ala
  MOD_RES (3)..(3): Gln, Glu, Orn or  Nle
  MOD_RES (15)..(15): Asp, Glu, cysteic acid, homoglutamic acid and homocysteic acid
  MOD_RES (16)..(16): Ser, Glu, Gln, homoglutamic acid or homocysteic acid
  MOD_RES (20)..(20): Gln, Lys, Arg, Orn or Citrulline
  MOD_RES (21)..(21): Gln, Glu, Asp, Cys, Orn, homocycstein or acetyl phenyalanine
  MOD_RES (23)..(23): Val or Ile
  MOD_RES (24)..(24): Ala, Gln, Glu, Cys, Orn, homocycsteine or acetyl phenyalanine
  MOD_RES (27)..(27): Met, Leu or Nle
  MOD_RES (28)..(28): Asn, Lys or Asp
  MOD_RES (29)..(29): Thr, Gly, Lys, Cys, Orn, homocycsteine or acetyl phenyalanine
XXXGTFTSDYSKYLXXRRAXXFXXWLXXX

SEQ ID NO: 57 - protein, 29 aa, Artificial Sequence
  Synthetic Glucagon Analogue
  MOD_RES (1)..(1): His, D-His, (Des-amino)His, hydroxyl-His, acetyl- His, homo-His, DMIA, N-methyl His, alpha-methyl His, or imidazole acetic acid
  MOD_RES (2)..(2): Ser, D-Ser, Ala, D-Ala, Val, Gly, N-methyl Ser, AIB or N-methyl Ala
  MOD_RES (3)..(3): Gln, Glu, Orn or  Nle
  MISC_FEATURE (12)..(16): Lactam ring between side changes at position 12 and 16
  MOD_RES (15)..(15): Asp, Glu, cysteic acid, homoglutamic acid and homocysteic acid
  MOD_RES (20)..(20): Gln, Lys, Arg, Orn or Citrulline
  MOD_RES (21)..(21): Gln, Glu, Asp, Cys, Orn, homocycsteine or acetyl phenyalanine
  MOD_RES (23)..(23): Val or Ile
  MOD_RES (24)..(24): Ala, Gln, Glu, Lys, Cys, Orn, homocysteine or acetyl Phe
  MOD_RES (27)..(27): Met, Leu or Nle
  MOD_RES (28)..(28): Asn, Lys or Asp
  MOD_RES (29)..(29): Thr, Gly, Lys, Cys, Orn, homocysteine or acetyl phenyalanine
XXXGTFTSDYSKYLXERRAXXFXXWLXXX

SEQ ID NO: 58 - protein, 29 aa, Artificial Sequence
  Synthetic Glucagon Analogue
  MOD_RES (1)..(1): His, D-His, (Des-amino)His, hydroxyl-His, acetyl-His, homo-His, DMIA, N-methyl His, alpha-methyl His, or imidazole acetic acid
  MOD_RES (2)..(2): Ser, D-Ser, Ala, D-Ala, Val, Gly, N-methyl Ser, AIB or N-methyl Ala
  MOD_RES (3)..(3): Gln, Glu, Orn or Nle
  MOD_RES (15)..(15): Asp, Glu, cysteic acid, homoglutamic acid or homocysteic acid
  MISC_FEATURE (16)..(20): Lactam ring between side chains at positions 16 and 20
  MOD_RES (21)..(21): Gln, Glu, Asp, Lys, Cys, Orn, homocysteine or acetyl phenyalanine
  MOD_RES (23)..(23): Val or Ile
  MOD_RES (24)..(24): Ala, Gln, Glu, Lys, Cys, Orn, homocysteine or acetyl phenyalanine
  MOD_RES (27)..(27): Met, Leu or Nle
  MOD_RES (28)..(28): Asn, Lys or Asp
  MOD_RES (29)..(29): Thr, Gly, Lys, Cys, Orn, homocysteine or acetyl phenyalanine
XXXGTFTSDYSKYLXERRAKXFXXWLXXX

SEQ ID NO: 59 - protein, 29 aa, Artificial Sequence
  Synthetic Glucagon Analogue
  MOD_RES (1)..(1): His, D-His, (Des-amino)His, hydroxyl-His, acetyl-His, homo-His, DMIA, N-methyl His, alpha-methyl His, or imidazole acetic acid
  MOD_RES (2)..(2): Ser, D-Ser, Ala, D-Ala, Val, Gly, N-methyl Ser, AIB, or N-methyl Ala
  MOD_RES (3)..(3): Gln, Glu, Orn or  Nle
  MOD_RES (15)..(15): Asp, Glu, cysteic acid, homoglutamic acid and homocysteic acid
  MOD_RES (16)..(16): Ser, Glu, Gln, homoglutamic acid or homocysteic acid
  MISC_FEATURE (20)..(24): Lactam ring between side chains at position 20 and 24
  MOD_RES (21)..(21): Gln, Glu, Asp, Lys, Cys, Orn, homocysteine or acetyl phenyalanine
  MOD_RES (23)..(23): Val or Ile
  MOD_RES (27)..(27): Met, Leu or Nle
  MOD_RES (28)..(28): Asn, Lys or Asp
  MOD_RES (29)..(29): Thr, Gly, Lys, Cys, Orn, homocysteine or acetyl pheylalanine
XXXGTFTSDYSKYLXXRRAKXFXEWLXXX

SEQ ID NO: 60 - protein, 29 aa, Artificial Sequence
  Synthetic Glucagon Analogue
  MOD_RES (1)..(1): His, D-His, (Des-amino)His, hydroxyl-His, acetyl-His, homo-His, DMIA, N-methyl His, alpha-methyl His, or imidazole acetic acid
  MOD_RES (2)..(2): Ser, D-Ser, Ala, D-Ala, Val, Gly, N-methyl Ser, AIB or N-methyl Ala
  MOD_RES (3)..(3): Gln, Glu, Orn or  Nle
  MOD_RES (15)..(15): Asp, Glu, cysteic acid, homoglutamic acid and homocysteic acid
  MOD_RES (16)..(16): Ser, Glu, Gln, homoglutamic acid or homocysteic acid
  MOD_RES (20)..(20): Gln, Lys, Arg, Orn, or Citrulline
  MOD_RES (21)..(21): Gln, Glu, Asp, Lys, Cys, Orn, homocysteine or acetyl phenyalanine
  MOD_RES (23)..(23): Val or Ile
  MISC_FEATURE (24)..(28): Lactam ring between side chains at position 24 and 28
  MOD_RES (27)..(27): Met, Leu or Nle
  MOD_RES (29)..(29): Thr, Gly, Lys, Cys, Orn, homocysteine or acetyl phenyalanine
XXXGTFTSDYSKYLXXRRAXXFXEWLXKX

SEQ ID NO: 61 - protein, 40 aa, Artificial Sequence
  Synthetic Glucagon Analogue
  MISC_FEATURE: positions 30 to 40 are present only if position 29 is Gly; see specification as filed for detailed description of substitutions and preferred embodiments
  MOD_RES (1)..(1): His, D-His, (Des-amino)His, hydroxyl-His, acetyl-His, homo-His, DMIA, N-methyl His, alpha-methyl His, or imidazole acetic acid
  MOD_RES (2)..(2): Ser, D-Ser, Ala, Val, Gly, N-methyl Ser, Aib, N-methyl, Ala or D-Ala
  MOD_RES (18)..(18): Ala or Arg
  MOD_RES (24)..(24): Ala, Gln or Cys-PEG
  MOD_RES (29)..(29): Thr-CONH2, Cys-PEG, or Gly
  MOD_RES (40)..(40): Cys-PEG or not present
XXQGTFTSDYSKYLDERXAKDFVXWLMNXGPSSGAPPPSC

SEQ ID NO: 62 - protein, 40 aa, Artificial Sequence
  Synthetic Glucagon Analogue
  MISC_FEATURE: positions 30 to 40 are present only if position 29 is Gly; see specification as filed for detailed description of substitutions and preferred embodiments
  MOD_RES (1)..(1): His, D-His, (Des-amino)His, hydroxyl-His, acetyl-His, homo-His, DMIA, N-methyl His, alpha-methyl His, or imidazole acetic acid
  MOD_RES (2)..(2): Ser, D-Ser, Ala, Val, Gly, N-methyl Ser, AIB0, N-methyl Ala, or D-Ala
  MOD_RES (18)..(18): Ala or Arg
  MOD_RES (24)..(24): Ala, Gln or Cys-PEG
  MOD_RES (29)..(29): Thr-CONH2, Cys-PEG, or Gly
  MOD_RES (40)..(40): Cys-PEG or not present
XXQGTFTSDYSKYLDEQXAKEFIXWLMNXGPSSGAPPPSC

SEQ ID NO: 63 - protein, 29 aa, Artificial Sequence
  Synthetic Glucagon Analogue
  MOD_RES (16)..(16): Ser, Glu, Gln, homoglutamic acid or homocysteic acid
  MOD_RES (20)..(20): Gln or Lys
  MOD_RES (21)..(21): Asp, Lys, Cys, Orn, homocysteine or acetyl phealanine
  MOD_RES (24)..(24): Gln, Lys, Cys, Orn, homocysteine or acetyl phealanine
  MOD_RES (27)..(27): Met, Leu or Nle
HSQGTFTSDYSKYLDXRRAXXFVXWLXNT

SEQ ID NO: 64 - protein, 38 aa, Artificial Sequence
  Synthetic Glucagon Analogue
  MOD_RES (15)..(15): Asp, Glu, homoglutamic acid, cysteic acid or homocysteic acid
  MOD_RES (16)..(16): Ser, Glu, Gln, homoglutamic acid or homocysteic acid
  MOD_RES (20)..(20): Gln or Lys
  MOD_RES (24)..(24): Gln or Glu
  MOD_RES (28)..(28): Asn, Lys or Asp
HSQGTFTSDYSKYLXXRRAXDFVXWLMXGGPSSGPPPS

SEQ ID NO: 65 - protein, 11 aa, Artificial Sequence
  Synthetic peptide fragment representing the carboxy terminal 10 amino acids of Exdendin-4
  MOD_RES (11)..(11): Cys-PEG
GPSSGAPPPSC

SEQ ID NO: 66 - protein, 29 aa, Artificial Sequence
  Synthetic Glucagon Analogue
  MISC_FEATURE (12)..(16): Lactam ring between side chains at positions 12 and 16
  MOD_RES (28)..(28): Asp or Asn
  MOD_RES (29)..(29): Thr or Gly
HSQGTFTSDYSKYLDERRAQDFVQWLMXX

SEQ ID NO: 67 - protein, 29 aa, Artificial Sequence
  Synthetic Glucagon Analogue
  MISC_FEATURE (16)..(20): Lactam ring between side chains at positions 16 and 20
  MOD_RES (28)..(28): Asp or Asn
  MOD_RES (29)..(29): Thr or Gly
HSQGTFTSDYSKYLDERRAKDFVQWLMXX

SEQ ID NO: 68 - protein, 29 aa, Artificial Sequence
  Synthetic Glucagon Analogue
  MISC_FEATURE (20)..(24): Lactam ring between side chains at positions 20 and 24
  MOD_RES (28)..(28): Asp or Asn
  MOD_RES (29)..(29): Thr or Gly
HSQGTFTSDYSKYLDSRRAKDFVEWLMXX

SEQ ID NO: 69 - protein, 29 aa, Artificial Sequence
  glucagon analogue
  MISC_FEATURE (24)..(28): Lactam ring between side chains at positions 24 and 28
  MOD_RES (29)..(29): Thr or Gly
HSQGTFTSDYSKYLDSRRAQDFVEWLMKX

SEQ ID NO: 70 - protein, 29 aa, Artificial Sequence
  Synthetic peptide
  MISC_FEATURE: c-term amidation
HSQGTFTSDYSKYLDERRAQDFVQWLMNT

SEQ ID NO: 71 - protein, 29 aa, Artificial Sequence
  Synthetic peptide
  MISC_FEATURE: c-term amidation
HSQGTFTSDYSKYLDERRAKDFVQWLMNT

SEQ ID NO: 72 - protein, 29 aa, Artificial Sequence
  Synthetic peptide
  MISC_FEATURE: c-term amidation
  MISC_FEATURE (16)..(20): Lactam ring between side chains at positions 16 and 20
HSQGTFTSDYSKYLDERRAKDFVQWLMNT

SEQ ID NO: 73 - protein, 29 aa, Artificial Sequence
  Synthetic peptide
  MISC_FEATURE: c-term amidation
  MISC_FEATURE (12)..(16): Lactam ring between side chains at positions 12 and 16
HSQGTFTSDYSKYLDERRAQDFVQWLMNT

SEQ ID NO: 74 - protein, 29 aa, Artificial Sequence
  Synthetic peptide
  MISC_FEATURE: c-term amidation
  MISC_FEATURE (12)..(16): Lactam ring between side chains at positions 12 and 16
HSQGTFTSDYSKYLDERRAKDFVQWLMNT

SEQ ID NO: 75 - protein, 29 aa, Artificial Sequence
  Synthetic peptide
  MISC_FEATURE: c-term amidation
  MISC_FEATURE (16)..(20): Lactam ring between side chains at positions 16 and 20
HSQGTFTSDYSKYLDKRRAEDFVQWLMNT

SEQ ID NO: 76 - protein, 29 aa, Artificial Sequence
  Synthetic peptide
  MISC_FEATURE: c-term amidation
HSQGTFTSDYSKYLDERAAKDFVQWLMNT

SEQ ID NO: 77 - protein, 29 aa, Artificial Sequence
  Synthetic Polypeptide
  MISC_FEATURE: c-term amidation
  MISC_FEATURE (16)..(20): Lactam ring between side chains at positions 16 and 20
HSQGTFTSDYSKYLDERAAKDFVQWLMNT

SEQ ID NO: 78 - protein, 29 aa, Artificial Sequence
  Synthetic Polypeptide
  MISC_FEATURE: c-term amidation
  MISC_FEATURE (12)..(16): Lactam ring between side chains at positions 12 and 16
HSQGTFTSDYSKYLDERAAQDFVQWLMNT

SEQ ID NO: 79 - protein, 29 aa, Artificial Sequence
  Synthetic Polypeptide
  MISC_FEATURE: c-term amidation
  MISC_FEATURE (12)..(16): Lactam ring between side chains at positions 12 and 16
HSQGTFTSDYSKYLDERAAKDFVQWLMNT

SEQ ID NO: 80 - protein, 29 aa, Artificial Sequence
  Synthetic Polypeptide
  MISC_FEATURE: c-term amidation
  MISC_FEATURE (16)..(20): Lactam ring between side chains at positions 16 and 20
HSQGTFTSDYSKYLDKRAAEDFVQWLMNT

SEQ ID NO: 81 - protein, 29 aa, Artificial Sequence
  Synthetic Polypeptide
  MISC_FEATURE: c-term amidation
HSQGTFTSDYSKYLDEQAAKEFIAWLMNT

SEQ ID NO: 82 - protein, 29 aa, Artificial Sequence
  Synthetic Polypeptide
  MISC_FEATURE: c-term amidation
  MISC_FEATURE (12)..(16): Lactam ring between side chains at positions 12 and 16
HSQGTFTSDYSKYLDEQAAKEFIAWLMNT

SEQ ID NO: 83 - protein, 29 aa, Artificial Sequence
  Synthetic Polypeptide
  MISC_FEATURE: c-term amidation
  MISC_FEATURE (16)..(20): Lactam ring between side chains at positions 16 and 20
HSQGTFTSDYSKYLDEQAAKEFIAWLMNT

SEQ ID NO: 84 - protein, 29 aa, Artificial Sequence
  Synthetic Polypeptide
  MISC_FEATURE: c-term amidation
HSQGTFTSDYSKYLDEQAAKEFIAWLVKG

SEQ ID NO: 85 - protein, 29 aa, Artificial Sequence
  Synthetic Polypeptide
  MISC_FEATURE: c-term amidation
  MISC_FEATURE (12)..(16): Lactam ring between side chains at positions 12 and 16
HSQGTFTSDYSKYLDEQAAKEFIAWLVKG

SEQ ID NO: 86 - protein, 29 aa, Artificial Sequence
  Synthetic Polypeptide
  MISC_FEATURE: c-term amidation
  MISC_FEATURE (16)..(20): Lactam ring between side chains at positions 16 and 20
HSQGTFTSDYSKYLDEQAAKEFIAWLVKG

SEQ ID NO: 87 - protein, 29 aa, Artificial Sequence
  Synthetic Polypeptide
  MISC_FEATURE: c-term amidation
  MOD_RES (1)..(1): (Des-amino)His
XSQGTFTSDYSKYLDERRAQDFVQWLMNT

SEQ ID NO: 88 - protein, 29 aa, Artificial Sequence
  Synthetic Polypeptide
  MISC_FEATURE: c-term amidation
  MOD_RES (1)..(1): (Des-amino)His
XSQGTFTSDYSKYLDERRAKDFVQWLMNT

SEQ ID NO: 89 - protein, 29 aa, Artificial Sequence
  Synthetic Polypeptide
  MISC_FEATURE: c-term amidation
  MOD_RES (1)..(1): (Des-amino)His
  MISC_FEATURE (16)..(20): Lactam ring between side chains at positions 16 and 20
XSQGTFTSDYSKYLDERRAKDFVQWLMNT

SEQ ID NO: 90 - protein, 29 aa, Artificial Sequence
  Synthetic Polypeptide
  MISC_FEATURE: c-term amidation
  MOD_RES (1)..(1): (Des-amino)His
  MISC_FEATURE (12)..(16): Lactam ring between side chains at positions 12 and 16
XSQGTFTSDYSKYLDERRAQDFVQWLMNT

SEQ ID NO: 91 - protein, 29 aa, Artificial Sequence
  Synthetic Polypeptide
  MISC_FEATURE: c-term amidation
  MOD_RES (1)..(1): (Des-amino)His
  MISC_FEATURE (12)..(16): Lactam ring between side chains at positions 12 and 16
XSQGTFTSDYSKYLDERRAKDFVQWLMNT

SEQ ID NO: 92 - protein, 29 aa, Artificial Sequence
  Synthetic Polypeptide
  MISC_FEATURE: c-term amidation
  MOD_RES (1)..(1): (Des-amino)His
  MISC_FEATURE (16)..(20): Lactam ring between side chains at positions 16 and 20
XSQGTFTSDYSKYLDKRRAEDFVQWLMNT

SEQ ID NO: 93 - protein, 29 aa, Artificial Sequence
  Synthetic Polypeptide
  MOD_RES (1)..(1): (Des-amino)His
  MISC_FEATURE (29)..(29): c-term amidation
XSQGTFTSDYSKYLDERAAKDFVQWLMNT

SEQ ID NO: 94 - protein, 29 aa, Artificial Sequence
  Synthetic Polypeptide
  MISC_FEATURE: c-term amidation
  MOD_RES (1)..(1): (Des-amino)His
  MISC_FEATURE (16)..(20): Lactam ring between side chains at positions 16 and 20
XSQGTFTSDYSKYLDERAAKDFVQWLMNT

SEQ ID NO: 95 - protein, 29 aa, Artificial Sequence
  Synthetic Polypeptide
  MISC_FEATURE: c-term amidation
  MOD_RES (1)..(1): (Des-amino)His
  MISC_FEATURE (12)..(16): Lactam ring between side chains at positions 12 and 16
XSQGTFTSDYSKYLDERAAQDFVQWLMNT

SEQ ID NO: 96 - protein, 29 aa, Artificial Sequence
  Synthetic Polypeptide
  MISC_FEATURE: c-term amidation
  MOD_RES (1)..(1): (Des-amino)His
  MISC_FEATURE (12)..(16): Lactam ring between side chains at positions 12 and 16
XSQGTFTSDYSKYLDERAAKDFVQWLMNT

SEQ ID NO: 97 - protein, 29 aa, Artificial Sequence
  Synthetic Polypeptide
  MISC_FEATURE: c-term amidation
  MOD_RES (1)..(1): (Des-amino)His
  MISC_FEATURE (16)..(20): Lactam ring between side chains at positions 16 and 20
XSQGTFTSDYSKYLDKRAAEDFVQWLMNT

SEQ ID NO: 98 - protein, 29 aa, Artificial Sequence
  Synthetic Polypeptide
  MISC_FEATURE: c-term amidation
  MOD_RES (1)..(1): (Des-amino)His
  MISC_FEATURE (12)..(16): Lactam ring between side chains at positions 12 and 16
XSQGTFTSDYSKYLDEQAAKEFIAWLMNT

SEQ ID NO: 99 - protein, 29 aa, Artificial Sequence
  Synthetic Polypeptide
  MISC_FEATURE: c-term amidation
  MOD_RES (1)..(1): (Des-amino)His
  MISC_FEATURE (12)..(16): Lactam ring between side chains at positions 12 and 16
XSQGTFTSDYSKYLDEQAAKEFIAWLMNT

SEQ ID NO: 100 - protein, 29 aa, Artificial Sequence
  Synthetic Polypeptide
  MISC_FEATURE: c-term amidation
  MOD_RES (1)..(1): (Des-amino)His
  MISC_FEATURE (16)..(20): Lactam ring between side chains at positions 16 and 20
XSQGTFTSDYSKYLDEQAAKEFIAWLMNT

SEQ ID NO: 101 - protein, 29 aa, Artificial Sequence
  Synthetic Polypeptide
  MISC_FEATURE: c-term amidation
  MOD_RES (1)..(1): (Des-amino)His
XSQGTFTSDYSKYLDEQAAKEFIAWLVKG

SEQ ID NO: 102 - protein, 29 aa, Artificial Sequence
  Synthetic Polypeptide
  MISC_FEATURE: c-term amidation
  MOD_RES (1)..(1): (Des-amino)His
  MISC_FEATURE (12)..(16): Lactam ring between side chains at positions 12 and 16
XSQGTFTSDYSKYLDEQAAKEFIAWLVKG

SEQ ID NO: 103 - protein, 29 aa, Artificial Sequence
  Synthetic Polypeptide
  MISC_FEATURE: c-term amidation
  MOD_RES (1)..(1): (Des-amino)His
  MISC_FEATURE (16)..(20): Lactam ring between side chains at positions 16 and 20
XSQGTFTSDYSKYLDEQAAKEFIAWLVKG

SEQ ID NO: 104 - protein, 29 aa, Artificial Sequence
  Synthetic Polypeptide
  MOD_RES (2)..(2): Aminoisobutyric acid
  MISC_FEATURE (29)..(29): c-term amidation
HXQGTFTSDYSKYLDERRAQDFVQWLMNT

SEQ ID NO: 105 - protein, 29 aa, Artificial Sequence
  Synthetic Polypeptide
  MISC_FEATURE: c-term amidation
  MOD_RES (2)..(2): Aminoisobutyric acid
  MISC_FEATURE (16)..(20): Lactam ring between side chains at positions 16 and 20
HXQGTFTSDYSKYLDERRAKDFVQWLMNT

SEQ ID NO: 106 - protein, 29 aa, Artificial Sequence
  Synthetic Polypeptide
  MISC_FEATURE: c-term amidation
  MOD_RES (2)..(2): Aminoisobutyric acid
  MISC_FEATURE (16)..(20): Lactam ring between side chains at positions 16 and 20
HXQGTFTSDYSKYLDERRAKDFVQWLMNT

SEQ ID NO: 107 - protein, 29 aa, Artificial Sequence
  Synthetic Polypeptide
  MISC_FEATURE: c-term amidation
  MOD_RES (2)..(2): Aminoisobutyric acid
  MISC_FEATURE (12)..(16): Lactam ring between side chains at positions 12 and 16
HXQGTFTSDYSKYLDERRAQDFVQWLMNT

SEQ ID NO: 108 - protein, 29 aa, Artificial Sequence
  Synthetic Polypeptide
  MISC_FEATURE: c-term amidation
  MOD_RES (2)..(2): Aminoisebutyric acid
  MISC_FEATURE (12)..(16): Lactam ring between side chains at positions 12 and 16
HXQGTFTSDYSKYLDERRAKDFVQWLMNT

SEQ ID NO: 109 - protein, 29 aa, Artificial Sequence
  Synthetic Polypeptide
  MISC_FEATURE: c-term amidation
  MOD_RES (2)..(2): Aminoisobutyric acid
  MISC_FEATURE (16)..(20): Lactam ring between side chains at positions 16 and 20
HXQGTFTSDYSKYLDKRRAEDFVQWLMNT

SEQ ID NO: 110 - protein, 29 aa, Artificial Sequence
  Synthetic Polypeptide
  MISC_FEATURE: c-term amidation
  MOD_RES (2)..(2): Aminoisobutyric acid
HXQGTFTSDYSKYLDERAAKDFVQWLMNT

SEQ ID NO: 111 - protein, 29 aa, Artificial Sequence
  Synthetic Polypeptide
  MISC_FEATURE: c-term amidation
  MOD_RES (2)..(2): Aminoisobutyric acid
  MISC_FEATURE (16)..(20): Lactam ring between side chains at positions 16 and 20
HXQGTFTSDYSKYLDERAAKDFVQWLMNT

SEQ ID NO: 112 - protein, 29 aa, Artificial Sequence
  Synthetic Polypeptide
  MISC_FEATURE: c-term amidation
  MOD_RES (2)..(2): Aminoisobutryic acid
  MISC_FEATURE (12)..(16): Lactam ring between side chains at positions 12 and 16
HXQGTFTSDYSKYLDERAAQDFVQWLMNT

SEQ ID NO: 113 - protein, 29 aa, Artificial Sequence
  glucagon analog
  MISC_FEATURE: c-term amidation
  MOD_RES (2)..(2): Aminoisobutryic acid
  MISC_FEATURE (12)..(16): Lactam ring between side chains at positions 12 and 16
HXQGTFTSDYSKYLDERAAKDFVQWLMNT

SEQ ID NO: 114 - protein, 29 aa, Artificial Sequence
  glucagon analog
  MISC_FEATURE: c-term amidation
  MOD_RES (2)..(2): Aminoisobutryic acid
  MISC_FEATURE (16)..(20): Lactam ring between side chains at positions 16 and 20
HXQGTFTSDYSKYLDKRAAEDFVQWLMNT

SEQ ID NO: 115 - protein, 29 aa, Artificial Sequence
  glucagon analog
  MISC_FEATURE: c-term amidation
  MOD_RES (2)..(2): Aminoisobutyric acid
HXQGTFTSDYSKYLDEQAAKEFIAWLMNT

SEQ ID NO: 116 - protein, 29 aa, Artificial Sequence
  glucagon analog
  MISC_FEATURE: c-term amidation
  MOD_RES (2)..(2): Aminoisobutryic acid
  MISC_FEATURE (12)..(16): Lactam ring between side chains at positions 12 and 16
HXQGTFTSDYSKYLDEQAAKEFIAWLMNT

SEQ ID NO: 117 - protein, 29 aa, Artificial Sequence
  glucagon analog
  MISC_FEATURE: c-term amidation
  MOD_RES (2)..(2): Aminoisobutryic acid
  MISC_FEATURE (16)..(20): Lactam ring between side chains at positions 16 and 20
HXQGTFTSDYSKYLDEQAAKEFIAWLMNT

SEQ ID NO: 118 - protein, 29 aa, Artificial Sequence
  glucagon analog
  MISC_FEATURE: c-term amidation
  MOD_RES (2)..(2): Aminoisobutyric acid
HXQGTFTSDYSKYLDEQAAKEFIAWLVKG

SEQ ID NO: 119 - protein, 29 aa, Artificial Sequence
  glucagon analog
  MISC_FEATURE: c-term amidation
  MOD_RES (2)..(2): Aminoisobutyric acid
  MISC_FEATURE (12)..(16): Lactam ring between side chains at positions 12 and 16
HXQGTFTSDYSKYLDEQAAKEFIAWLVKG

SEQ ID NO: 120 - protein, 29 aa, Artificial Sequence
  glucagon analog
  MISC_FEATURE: c-term amidation
  MOD_RES (2)..(2): Aminoisobutyric acid
  MISC_FEATURE (16)..(20): Lactam ring between side chains at positions 16 and 20
HXQGTFTSDYSKYLDEQAAKEFIAWLVKG

SEQ ID NO: 121 - protein, 29 aa, Artificial Sequence
  glucagon analog
  MISC_FEATURE: c-term amidation
  MOD_RES (2)..(2): D-Ala
HXQGTFTSDYSKYLDERRAQDFVQWLMNT

SEQ ID NO: 122 - protein, 29 aa, Artificial Sequence
  glucagon analog
  MISC_FEATURE: c-term amidation
  MOD_RES (2)..(2): D-Ala
HXQGTFTSDYSKYLDERRAKDFVQWLMNT

SEQ ID NO: 123 - protein, 29 aa, Artificial Sequence
  glucagon analog
  MISC_FEATURE: c-term amidation
  MOD_RES (2)..(2): D-Ala
  MISC_FEATURE (16)..(20): Lactam ring between side chains at positions 16 and 20
HXQGTFTSDYSKYLDERRAKDFVQWLMNT

SEQ ID NO: 124 - protein, 29 aa, Artificial Sequence
  glucagon analog
  MISC_FEATURE: c-term amidation
  MOD_RES (2)..(2): D-Ala
  MISC_FEATURE (12)..(16): Lactam ring between side chains at positions 12 and 16
HXQGTFTSDYSKYLDERRAQDFVQWLMNT

SEQ ID NO: 125 - protein, 29 aa, Artificial Sequence
  glucagon analog
  MISC_FEATURE: c-term amidation
  MOD_RES (2)..(2): D-Ala
  MISC_FEATURE (12)..(16): Lactam ring between side chains at positions 12 and 16
HXQGTFTSDYSKYLDERRAKDFVQWLMNT

SEQ ID NO: 126 - protein, 29 aa, Artificial Sequence
  glucagon analog
  MISC_FEATURE: c-term amidation
  MOD_RES (2)..(2): D-Ala
  MISC_FEATURE (16)..(20): Lactam ring between side chains at positions 16 and 20
HXQGTFTSDYSKYLDKRRAEDFVQWLMNT

SEQ ID NO: 127 - protein, 29 aa, Artificial Sequence
  glucagon analog
  MISC_FEATURE: c-term amidation
  MOD_RES (2)..(2): D-Ala
HXQGTFTSDYSKYLDERAAKDFVQWLMNT

SEQ ID NO: 128 - protein, 29 aa, Artificial Sequence
  glucagon analog
  MISC_FEATURE: c-term amidation
  MOD_RES (2)..(2): D-Ala
  MISC_FEATURE (16)..(20): Lactam ring between side chains at positions 16 and 20
HXQGTFTSDYSKYLDERAAKDFVQWLMNT

SEQ ID NO: 129 - protein, 29 aa, Artificial Sequence
  glucagon analog
  MISC_FEATURE: c-term amidation
  MOD_RES (2)..(2): D-Ala
  MISC_FEATURE (12)..(16): Lactam ring between side chains at positions 12 and 16
HXQGTFTSDYSKYLDERAAQDFVQWLMNT

SEQ ID NO: 130 - protein, 29 aa, Artificial Sequence
  glucagon analog
  MISC_FEATURE: c-term amidation
  MOD_RES (2)..(2): D-Ala
  MISC_FEATURE (12)..(16): Lactam ring between side chains at positions 12 and 16
HXQGTFTSDYSKYLDERAAKDFVQWLMNT

SEQ ID NO: 131 - protein, 29 aa, Artificial Sequence
  glucagon analog
  MISC_FEATURE: c-term amidation
  MOD_RES (2)..(2): D-Ala
  MISC_FEATURE (16)..(20): Lactam ring between side chains at positions 16 and 20
HXQGTFTSDYSKYLDKRAAEDFVQWLMNT

SEQ ID NO: 132 - protein, 29 aa, Artificial Sequence
  glucagon analog
  MISC_FEATURE: c-term amidation
  MOD_RES (2)..(2): D-Ala
HXQGTFTSDYSKYLDEQAAKEFIAWLMNT

SEQ ID NO: 133 - protein, 29 aa, Artificial Sequence
  glucagon analog
  MISC_FEATURE: c-term amidation
  MOD_RES (2)..(2): D-Ala
  MISC_FEATURE (12)..(16): Lactam ring between side chains at positions 12 and 16
HXQGTFTSDYSKYLDEQAAKEFIAWLMNT

SEQ ID NO: 134 - protein, 29 aa, Artificial Sequence
  glucagon analog
  MISC_FEATURE: c-term amidation
  MOD_RES (2)..(2): D-Ala
  MISC_FEATURE (16)..(20): Lactam ring between side chains at positions 16 and 20
HXQGTFTSDYSKYLDEQAAKEFIAWLMNT

SEQ ID NO: 135 - protein, 29 aa, Artificial Sequence
  glucagon analog
  MISC_FEATURE: c-term amidation
  MOD_RES (2)..(2): D-Ala
HXQGTFTSDYSKYLDEQAAKEFIAWLVKG

SEQ ID NO: 136 - protein, 29 aa, Artificial Sequence
  glucagon analog
  MISC_FEATURE: c-term amidation
  MOD_RES (2)..(2): D-Ala
  MISC_FEATURE (12)..(16): Lactam ring between side chains at positions 12 and 16
HXQGTFTSDYSKYLDEQAAKEFIAWLVKG

SEQ ID NO: 137 - protein, 29 aa, Artificial Sequence
  glucagon analog
  MISC_FEATURE: c-term amidation
  MOD_RES (2)..(2): D-Ala
  MISC_FEATURE (16)..(20): Lactam ring between side chains at positions 16 and 20
HXQGTFTSDYSKYLDEQAAKEFIAWLVKG

SEQ ID NO: 138 - protein, 29 aa, Artificial Sequence
  glucagon analog
  MISC_FEATURE: c-term amidation
HSEGTFTSDYSKYLDERRAQDFVQWLMNT

SEQ ID NO: 139 - protein, 29 aa, Artificial Sequence
  glucagon analog
  MISC_FEATURE: c-term amidation
HSEGTFTSDYSKYLDERRAKDFVQWLMNT

SEQ ID NO: 140 - protein, 29 aa, Artificial Sequence
  glucagon analog
  MISC_FEATURE: c-term amidation
  MISC_FEATURE (16)..(20): Lactam ring between side chains at positions 16 and 20
HSEGTFTSDYSKYLDERRAKDFVQWLMNT

SEQ ID NO: 141 - protein, 29 aa, Artificial Sequence
  glucagon analog
  MISC_FEATURE: c-term amidation
  MISC_FEATURE (12)..(16): Lactam ring between side chains at positions 12 and 16
HSEGTFTSDYSKYLDERRAQDFVQWLMNT

SEQ ID NO: 142 - protein, 29 aa, Artificial Sequence
  glucagon analog
  MISC_FEATURE: c-term amidation
  MISC_FEATURE (12)..(16): Lactam ring between side chains at positions 12 and 16
HSEGTFTSDYSKYLDERRAKDFVQWLMNT

SEQ ID NO: 143 - protein, 29 aa, Artificial Sequence
  glucagon analog
  MISC_FEATURE: c-term amidation
  MISC_FEATURE (16)..(20): Lactam ring between side chains at positions 16 and 20
HSEGTFTSDYSKYLDKRRAEDFVQWLMNT

SEQ ID NO: 144 - protein, 29 aa, Artificial Sequence
  glucagon analog
  MISC_FEATURE: c-term amidation
HSEGTFTSDYSKYLDERAAKDFVQWLMNT

SEQ ID NO: 145 - protein, 29 aa, Artificial Sequence
  glucagon analog
  MISC_FEATURE: c-term amidation
  MISC_FEATURE (16)..(20): Lactam ring between side chains at positions 16 and 20
HSEGTFTSDYSKYLDERAAKDFVQWLMNT

SEQ ID NO: 146 - protein, 29 aa, Artificial Sequence
  glucagon analog
  MISC_FEATURE: c-term amidation
  MISC_FEATURE (12)..(16): Lactam ring between side chains at positions 12 and 16
HSEGTFTSDYSKYLDERAAQDFVQWLMNT

SEQ ID NO: 147 - protein, 29 aa, Artificial Sequence
  glucagon analog
  MISC_FEATURE: c-term amidation
  MISC_FEATURE (12)..(16): Lactam ring between side chains at positions 12 and 16
HSEGTFTSDYSKYLDERAAKDFVQWLMNT

SEQ ID NO: 148 - protein, 29 aa, Artificial Sequence
  glucagon analog
  MISC_FEATURE: c-term amidation
  MISC_FEATURE (16)..(20): Lactam ring between side chains at positions 16 and 20
HSEGTFTSDYSKYLDKRAAEDFVQWLMNT

SEQ ID NO: 149 - protein, 29 aa, Artificial Sequence
  glucagon analog
  MISC_FEATURE: c-term amidation
HSEGTFTSDYSKYLDEQAAKEFIAWLMNT

SEQ ID NO: 150 - protein, 29 aa, Artificial Sequence
  glucagon analog
  MISC_FEATURE: c-term amidation
  MISC_FEATURE (12)..(16): Lactam ring between side chains at positions 12 and 16
HSEGTFTSDYSKYLDEQAAKEFIAWLMNT

SEQ ID NO: 151 - protein, 29 aa, Artificial Sequence
  glucagon analog
  MISC_FEATURE: c-term amidation
  MISC_FEATURE (16)..(20): Lactam ring between side chains at positions 16 and 20
HSEGTFTSDYSKYLDEQAAKEFIAWLMNT

SEQ ID NO: 152 - protein, 29 aa, Artificial Sequence
  glucagon analog
  MISC_FEATURE: c-term amidation
HSEGTFTSDYSKYLDEQAAKEFIAWLVKG

SEQ ID NO: 153 - protein, 29 aa, Artificial Sequence
  glucagon analog
  MISC_FEATURE: c-term amidation
  MISC_FEATURE (12)..(16): Lactam ring between side chains at positions 12 and 16
HSEGTFTSDYSKYLDEQAAKEFIAWLVKG

SEQ ID NO: 154 - protein, 29 aa, Artificial Sequence
  glucagon analog
  MISC_FEATURE: c-term amidation
  MISC_FEATURE (16)..(20): Lactam ring between side chains at positions 16 and 20
HSEGTFTSDYSKYLDEQAAKEFIAWLVKG

SEQ ID NO: 155 - protein, 29 aa, Artificial Sequence
  glucagon analog
  MISC_FEATURE: c-term amidation
  MOD_RES (1)..(1): (Des-amino)His
XSEGTFTSDYSKYLDERRAQDFVQWLMNT

SEQ ID NO: 156 - protein, 29 aa, Artificial Sequence
  glucagon analog
  MISC_FEATURE: c-term amidation
  MOD_RES (1)..(1): (Des-amino)His
XSEGTFTSDYSKYLDERRAKDFVQWLMNT

SEQ ID NO: 157 - protein, 29 aa, Artificial Sequence
  glucagon analog
  MISC_FEATURE: c-term amidation
  MOD_RES (1)..(1): (Des-amino)His
  MISC_FEATURE (16)..(20): Lactam ring between side chains at positions 16 and 20
XSEGTFTSDYSKYLDERRAKDFVQWLMNT

SEQ ID NO: 158 - protein, 29 aa, Artificial Sequence
  glucagon analog
  MISC_FEATURE: c-term amidation
  MOD_RES (1)..(1): (Des-amino)His
  MISC_FEATURE (12)..(16): Lactam ring between side chains at positions 12 and 16
XSEGTFTSDYSKYLDERRAQDFVQWLMNT

SEQ ID NO: 159 - protein, 29 aa, Artificial Sequence
  glucagon analog
  MISC_FEATURE: c-term amidation
  MOD_RES (1)..(1): (Des-amino)His
  MISC_FEATURE (12)..(16): Lactam ring between side chains at positions 12 and 16
XSEGTFTSDYSKYLDERRAKDFVQWLMNT

SEQ ID NO: 160 - protein, 29 aa, Artificial Sequence
  glucagon analog
  MISC_FEATURE: c-term amidation
  MOD_RES (1)..(1): (Des-amino)His
  MISC_FEATURE (16)..(20): Lactam ring between side chains at positions 16 and 20
XSEGTFTSDYSKYLDKRRAEDFVQWLMNT

SEQ ID NO: 161 - protein, 29 aa, Artificial Sequence
  glucagon analog
  MISC_FEATURE: c-term amidation
  MOD_RES (1)..(1): (Des-amino)His
XSEGTFTSDYSKYLDERAAKDFVQWLMNT

SEQ ID NO: 162 - protein, 29 aa, Artificial Sequence
  glucagon analog
  MISC_FEATURE: c-term amidation
  MOD_RES (1)..(1): (Des-amino)His
  MISC_FEATURE (16)..(20): Lactam ring between side chains at positions 16 and 20
XSEGTFTSDYSKYLDERAAKDFVQWLMNT

SEQ ID NO: 163 - protein, 29 aa, Artificial Sequence
  glucagon analog
  MISC_FEATURE: c-term amidation
  MOD_RES (1)..(1): (Des-amino)His
  MISC_FEATURE (12)..(16): Lactam ring between side chains at positions 12 and 16
XSEGTFTSDYSKYLDERAAQDFVQWLMNT

SEQ ID NO: 164 - protein, 29 aa, Artificial Sequence
  glucagon analog
  MISC_FEATURE: c-term amidation
  MOD_RES (1)..(1): (Des-amino)His
  MISC_FEATURE (12)..(16): Lactam ring between side chains at positions 12 and 16
XSEGTFTSDYSKYLDERAAKDFVQWLMNT

SEQ ID NO: 165 - protein, 29 aa, Artificial Sequence
  glucagon analog
  MISC_FEATURE: c-term amidation
  MOD_RES (1)..(1): (Des-amino)His
  MISC_FEATURE (16)..(20): Lactam ring between side chains at positions 16 and 20
XSEGTFTSDYSKYLDKRAAEDFVQWLMNT

SEQ ID NO: 166 - protein, 29 aa, Artificial Sequence
  glucagon analog
  MISC_FEATURE: c-term amidation
  MOD_RES (1)..(1): (Des-amino)His
XSEGTFTSDYSKYLDEQAAKEFIAWLMNT

SEQ ID NO: 167 - protein, 29 aa, Artificial Sequence
  glucagon analog
  MISC_FEATURE: c-term amidation
  MOD_RES (1)..(1): (Des-amino)His
  MISC_FEATURE (12)..(16): Lactam ring between side chains at positions 12 and 16
XSEGTFTSDYSKYLDEQAAKEFIAWLMNT

SEQ ID NO: 168 - protein, 29 aa, Artificial Sequence
  glucagon analog
  MISC_FEATURE: c-term amidation
  MOD_RES (1)..(1): (Des-amino)His
  MISC_FEATURE (16)..(20): Lactam ring between side chains at positions 16 and 20
XSEGTFTSDYSKYLDEQAAKEFIAWLMNT

SEQ ID NO: 169 - protein, 29 aa, Artificial Sequence
  glucagon analog
  MISC_FEATURE: c-term amidation
  MOD_RES (1)..(1): (Des-amino)His
XSEGTFTSDYSKYLDEQAAKEFIAWLVKG

SEQ ID NO: 170 - protein, 29 aa, Artificial Sequence
  glucagon analog
  MISC_FEATURE: c-term amidation
  MOD_RES (1)..(1): (Des-amino)His
  MISC_FEATURE (12)..(16): Lactam ring between side chains at positions 12 and 16
XSEGTFTSDYSKYLDEQAAKEFIAWLVKG

SEQ ID NO: 171 - protein, 29 aa, Artificial Sequence
  glucagon analog
  MISC_FEATURE: c-term amidation
  MOD_RES (1)..(1): (Des-amino)His
  MISC_FEATURE (16)..(20): Lactam ring between side chains at positions 16 and 20
XSEGTFTSDYSKYLDEQAAKEFIAWLVKG

SEQ ID NO: 172 - protein, 29 aa, Artificial Sequence
  glucagon analog
  MISC_FEATURE: c-term amidation
  MOD_RES (2)..(2): Aminoisobutyric acid
HXEGTFTSDYSKYLDERRAQDFVQWLMNT

SEQ ID NO: 173 - protein, 29 aa, Artificial Sequence
  glucagon analog
  MISC_FEATURE: c-term amidation
  MOD_RES (2)..(2): Aminoisobutyric acid
HXEGTFTSDYSKYLDERRAKDFVQWLMNT

SEQ ID NO: 174 - protein, 29 aa, Artificial Sequence
  glucagon analog
  MISC_FEATURE: c-term amidation
  MOD_RES (2)..(2): Aminoisobutyric acid
  MISC_FEATURE (16)..(20): Lactam ring between side chains at positions 16 and 20
HXEGTFTSDYSKYLDERRAKDFVQWLMNT

SEQ ID NO: 175 - protein, 29 aa, Artificial Sequence
  glucagon analog
  MISC_FEATURE: c-term amidation
  MOD_RES (2)..(2): Aminoisobutyric acid
  MISC_FEATURE (12)..(16): Lactam ring between side chains at positions 12 and 16
HXEGTFTSDYSKYLDERRAQDFVQWLMNT

SEQ ID NO: 176 - protein, 29 aa, Artificial Sequence
  glucagon analog
  MISC_FEATURE: c-term amidation
  MOD_RES (2)..(2): Aminoisobutyric acid
  MISC_FEATURE (12)..(16): Lactam ring between side chains at positions 12 and 16
HXEGTFTSDYSKYLDERRAKDFVQWLMNT

SEQ ID NO: 177 - protein, 29 aa, Artificial Sequence
  glucagon analog
  MISC_FEATURE: c-term amidation
  MOD_RES (2)..(2): Aminoisobutyric acid
  MISC_FEATURE (16)..(20): Lactam ring between side chains at positions 16 and 20
HXEGTFTSDYSKYLDKRRAEDFVQWLMNT

SEQ ID NO: 178 - protein, 29 aa, Artificial Sequence
  glucagon analog
  MISC_FEATURE: c-term amidation
  MOD_RES (2)..(2): Aminoisobutyric acid
HXEGTFTSDYSKYLDERAAKDFVQWLMNT

SEQ ID NO: 179 - protein, 29 aa, Artificial Sequence
  glucagon analog
  MISC_FEATURE: c-term amidation
  MOD_RES (2)..(2): Aminoisobutyric acid
  MISC_FEATURE (16)..(20): Lactam ring between side chains at positions 16 and 20
HXEGTFTSDYSKYLDERAAKDFVQWLMNT

SEQ ID NO: 180 - protein, 29 aa, Artificial Sequence
  glucagon analog
  MISC_FEATURE: c-term amidation
  MOD_RES (2)..(2): Aminoisobutyric acid
  MISC_FEATURE (12)..(16): Lactam ring between side chains at positions 12 and 16
HXEGTFTSDYSKYLDERAAQDFVQWLMNT

SEQ ID NO: 181 - protein, 29 aa, Artificial Sequence
  glucagon analog
  MISC_FEATURE: c-term amidation
  MOD_RES (2)..(2): Aminoisobutyric acid
  MISC_FEATURE (12)..(16): Lactam ring between side chains at positions 12 and 16
HXEGTFTSDYSKYLDERAAKDFVQWLMNT

SEQ ID NO: 182 - protein, 29 aa, Artificial Sequence
  glucagon analog
  MISC_FEATURE: c-term amidation
  MOD_RES (2)..(2): Aminoisobutyric acid
  MISC_FEATURE (16)..(20): Lactam ring between side chains at positions 16 and 20
HXEGTFTSDYSKYLDKRAAEDFVQWLMNT

SEQ ID NO: 183 - protein, 29 aa, Artificial Sequence
  glucagon analog
  MISC_FEATURE: c-term amidation
  MOD_RES (2)..(2): Aminoisobutyric acid
HXEGTFTSDYSKYLDEQAAKEFIAWLMNT

SEQ ID NO: 184 - protein, 29 aa, Artificial Sequence
  glucagon analog
  MISC_FEATURE: c-term amidation
  MOD_RES (2)..(2): Aminoisobutyric acid
  MISC_FEATURE (12)..(16): Lactam ring between side chains at positions 12 and 16
HXEGTFTSDYSKYLDEQAAKEFIAWLMNT

SEQ ID NO: 185 - protein, 29 aa, Artificial Sequence
  glucagon analog
  MISC_FEATURE: c-term amidation
  MOD_RES (2)..(2): Aminoisobutyric acid
  MISC_FEATURE (16)..(20): Lactam ring between side chains at positions 16 and 20
HXEGTFTSDYSKYLDEQAAKEFIAWLMNT

SEQ ID NO: 186 - protein, 29 aa, Artificial Sequence
  glucagon analog
  MISC_FEATURE: c-term amidation
  MOD_RES (2)..(2): Aminoisobutyric acid
HXEGTFTSDYSKYLDEQAAKEFIAWLVKG

SEQ ID NO: 187 - protein, 29 aa, Artificial Sequence
  glucagon analog
  MISC_FEATURE: c-term amidation
  MOD_RES (2)..(2): Aminoisobutyric acid
  MISC_FEATURE (12)..(16): Lactam ring between side chains at positions 12 and 16
HXEGTFTSDYSKYLDEQAAKEFIAWLVKG

SEQ ID NO: 188 - protein, 29 aa, Artificial Sequence
  glucagon analog
  MISC_FEATURE: c-term amidation
  MOD_RES (2)..(2): Aminoisobutyric acid
  MISC_FEATURE (16)..(20): Lactam ring between side chains at positions 16 and 20
HXEGTFTSDYSKYLDEQAAKEFIAWLVKG

SEQ ID NO: 189 - protein, 29 aa, Artificial Sequence
  glucagon analog
  MISC_FEATURE: c-term amidation
  MOD_RES (2)..(2): D-Ala
HXEGTFTSDYSKYLDERRAQDFVQWLMNT

SEQ ID NO: 190 - protein, 29 aa, Artificial Sequence
  glucagon analog
  MISC_FEATURE: c-term amidation
  MOD_RES (2)..(2): D-Ala
HXEGTFTSDYSKYLDERRAKDFVQWLMNT

SEQ ID NO: 191 - protein, 29 aa, Artificial Sequence
  glucagon analog
  MISC_FEATURE: c-term amidation
  MOD_RES (2)..(2): D-Ala
  MISC_FEATURE (16)..(20): Lactam ring between side chains at positions 16 and 20
HXEGTFTSDYSKYLDERRAKDFVQWLMNT

SEQ ID NO: 192 - protein, 29 aa, Artificial Sequence
  glucagon analog
  MISC_FEATURE: c-term amidation
  MOD_RES (2)..(2): D-Ala
  MISC_FEATURE (12)..(16): Lactam ring between side chains at positions 12 and 16
HXEGTFTSDYSKYLDERRAQDFVQWLMNT

SEQ ID NO: 193 - protein, 29 aa, Artificial Sequence
  glucagon analog
  MISC_FEATURE: c-term amidation
  MOD_RES (2)..(2): D-Ala
  MISC_FEATURE (12)..(16): Lactam ring between side chains at positions 12 and 16
HXEGTFTSDYSKYLDERRAKDFVQWLMNT

SEQ ID NO: 194 - protein, 29 aa, Artificial Sequence
  glucagon analog
  MISC_FEATURE: c-term amidation
  MOD_RES (2)..(2): D-Ala
  MISC_FEATURE (16)..(20): Lactam ring between side chains at positions 16 and 20
HXEGTFTSDYSKYLDKRRAEDFVQWLMNT

SEQ ID NO: 195 - protein, 29 aa, Artificial Sequence
  glucagon analog
  MISC_FEATURE: c-term amidation
  MOD_RES (2)..(2): D-Ala
  MISC_FEATURE (16)..(20): Lactam ring between side chains at positions 16 and 20
HXEGTFTSDYSKYLDERAAKDFVQWLMNT

SEQ ID NO: 196 - protein, 29 aa, Artificial Sequence
  glucagon analog
  MISC_FEATURE: c-term amidation
  MOD_RES (2)..(2): D-Ala
  MISC_FEATURE (16)..(20): Lactam ring between side chains at positions 16 and 20
HXEGTFTSDYSKYLDERAAKDFVQWLMNT

SEQ ID NO: 197 - protein, 29 aa, Artificial Sequence
  glucagon analog
  MISC_FEATURE: c-term amidation
  MOD_RES (2)..(2): D-Ala
  MISC_FEATURE (12)..(16): Lactam ring between side chains at positions 12 and 16
HXEGTFTSDYSKYLDERAAQDFVQWLMNT

SEQ ID NO: 198 - protein, 29 aa, Artificial Sequence
  glucagon analog
  MISC_FEATURE: c-term amidation
  MOD_RES (2)..(2): D-Ala
  MISC_FEATURE (12)..(16): Lactam ring between side chains at positions 12 and 16
HXEGTFTSDYSKYLDERAAKDFVQWLMNT

SEQ ID NO: 199 - protein, 29 aa, Artificial Sequence
  glucagon analog
  MISC_FEATURE: c-term amidation
  MOD_RES (2)..(2): D-Ala
  MISC_FEATURE (16)..(20): Lactam ring between side chains at positions 16 and 20
HXEGTFTSDYSKYLDKRAAEDFVQWLMNT

SEQ ID NO: 200 - protein, 29 aa, Artificial Sequence
  glucagon analog
  MISC_FEATURE: c-term amidation
  MOD_RES (2)..(2): D-Ala
HXEGTFTSDYSKYLDEQAAKEFIAWLMNT

SEQ ID NO: 201 - protein, 29 aa, Artificial Sequence
  glucagon analog
  MISC_FEATURE: c-term amidation
  MOD_RES (2)..(2): D-Ala
  MISC_FEATURE (12)..(16): Lactam ring between side chains at positions 12 and 16
HXEGTFTSDYSKYLDEQAAKEFIAWLMNT

SEQ ID NO: 202 - protein, 29 aa, Artificial Sequence
  glucagon analog
  MISC_FEATURE: c-term amidation
  MOD_RES (2)..(2): D-Ala
  MISC_FEATURE (16)..(20): Lactam ring between side chains at positions 16 and 20
HXEGTFTSDYSKYLDEQAAKEFIAWLMNT

SEQ ID NO: 203 - protein, 29 aa, Artificial Sequence
  glucagon analog
  MISC_FEATURE: c-term amidation
  MOD_RES (2)..(2): D-Ala
HXEGTFTSDYSKYLDEQAAKEFIAWLVKG

SEQ ID NO: 204 - protein, 29 aa, Artificial Sequence
  glucagon analog
  MISC_FEATURE: c-term amidation
  MOD_RES (2)..(2): D-Ala
  MISC_FEATURE (12)..(16): Lactam ring between side chains at positions 12 and 16
HXEGTFTSDYSKYLDEQAAKEFIAWLVKG

SEQ ID NO: 205 - protein, 29 aa, Artificial Sequence
  glucagon analog
  MISC_FEATURE: Lactam ring between side chains at positions 16 and 20
  MOD_RES (2)..(2): D-Ala
  MISC_FEATURE (16)..(20): c-term amidation
HXEGTFTSDYSKYLDEQAAKEFIAWLVKG

SEQ ID NO: 206 - protein, 29 aa, Artificial Sequence
  glucagon analog
  MISC_FEATURE: c-term amidation
  MOD_RES (24)..(24): Cys-PEG
HSQGTFTSDYSKYLDERRAQDFVCWLMNT

SEQ ID NO: 207 - protein, 29 aa, Artificial Sequence
  glucagon analog
  MISC_FEATURE: c-term amidation
  MOD_RES (24)..(24): Cys-PEG
HSQGTFTSDYSKYLDERRAKDFVCWLMNT

SEQ ID NO: 208 - protein, 29 aa, Artificial Sequence
  glucagon analog
  MISC_FEATURE: c-term amidation
  MISC_FEATURE (16)..(20): Lactam ring between side chains at positions 16 and 20
  MOD_RES (24)..(24): Cys-PEG
HSQGTFTSDYSKYLDERRAKDFVCWLMNT

SEQ ID NO: 209 - protein, 29 aa, Artificial Sequence
  glucagon analog
  MISC_FEATURE: c-term amidation
  MISC_FEATURE (12)..(16): Lactam ring between side chains at positions 12 and 16
  MOD_RES (24)..(24): Cys-PEG
HSQGTFTSDYSKYLDERRAQDFVCWLMNT

SEQ ID NO: 210 - protein, 29 aa, Artificial Sequence
  glucagon analog
  MISC_FEATURE: c-term amidation
  MISC_FEATURE (12)..(16): Lactam ring between side chains at positions 12 and 16
  MOD_RES (24)..(24): Cys-PEG
HSQGTFTSDYSKYLDERRAKDFVCWLMNT

SEQ ID NO: 211 - protein, 29 aa, Artificial Sequence
  glucagon analog
  MISC_FEATURE: c-term amidation
  MISC_FEATURE (16)..(20): Lactam ring between side chains at positions 16 and 20
  MOD_RES (24)..(24): Cys-PEG
HSQGTFTSDYSKYLDKRRAEDFVCWLMNT

SEQ ID NO: 212 - protein, 29 aa, Artificial Sequence
  glucagon analog
  MISC_FEATURE: c-term amidation
  MISC_FEATURE (16)..(20): Lactam ring between side chains at positions 16 and 20
  MOD_RES (24)..(24): Cys-PEG
HSQGTFTSDYSKYLDERAAKDFVCWLMNT

SEQ ID NO: 213 - protein, 29 aa, Artificial Sequence
  glucagon analog
  MISC_FEATURE: c-term amidation
  MISC_FEATURE (16)..(20): Lactam ring between side chains at positions 16 and 20
  MOD_RES (24)..(24): Cys-PEG
HSQGTFTSDYSKYLDERAAKDFVCWLMNT

SEQ ID NO: 214 - protein, 29 aa, Artificial Sequence
  glucagon analog
  MISC_FEATURE: c-term amidation
  MISC_FEATURE (12)..(16): Lactam ring between side chains at positions 12 and 16
  MOD_RES (24)..(24): Cys-PEG
HSQGTFTSDYSKYLDERAAQDFVCWLMNT

SEQ ID NO: 215 - protein, 29 aa, Artificial Sequence
  glucagon analog
  MISC_FEATURE: c-term amidation
  MISC_FEATURE (12)..(16): Lactam ring between side chains at positions 12 and 16
  MOD_RES (24)..(24): Cys-PEG
HSQGTFTSDYSKYLDERAAKDFVCWLMNT

SEQ ID NO: 216 - protein, 29 aa, Artificial Sequence
  glucagon analog
  MISC_FEATURE: c-term amidation
  MISC_FEATURE (16)..(20): Lactam ring between side chains at positions 16 and 20
  MOD_RES (24)..(24): Cys-PEG
HSQGTFTSDYSKYLDKRAAEDFVCWLMNT

SEQ ID NO: 217 - protein, 29 aa, Artificial Sequence
  glucagon analog
  MISC_FEATURE: c-term amidation
  MOD_RES (24)..(24): Cys-PEG
HSQGTFTSDYSKYLDEQAAKEFICWLMNT

SEQ ID NO: 218 - protein, 29 aa, Artificial Sequence
  glucagon analog
  MISC_FEATURE: c-term amidation
  MISC_FEATURE (12)..(16): Lactam ring between side chains at positions 12 and 16
  MOD_RES (24)..(24): Cys-PEG
HSQGTFTSDYSKYLDEQAAKEFICWLMNT

SEQ ID NO: 219 - protein, 29 aa, Artificial Sequence
  glucagon analog
  MISC_FEATURE: c-term amidation
  MISC_FEATURE (16)..(20): Lactam ring between side chains at positions 16 and 20
  MOD_RES (24)..(24): Cys-PEG
HSQGTFTSDYSKYLDEQAAKEFICWLMNT

SEQ ID NO: 220 - protein, 29 aa, Artificial Sequence
  glucagon analog
  MISC_FEATURE: c-term amidation
  MOD_RES (24)..(24): Cys-PEG
HSQGTFTSDYSKYLDEQAAKEFICWLVKG

SEQ ID NO: 221 - protein, 29 aa, Artificial Sequence
  glucagon analog
  MISC_FEATURE: c-term amidation
  MISC_FEATURE (12)..(16): Lactam ring between side chains at positions 12 and 16
  MOD_RES (24)..(24): Cys-PEG
HSQGTFTSDYSKYLDEQAAKEFICWLVKG

SEQ ID NO: 222 - protein, 29 aa, Artificial Sequence
  glucagon analog
  MISC_FEATURE: c-term amidation
  MISC_FEATURE (16)..(20): Lactam ring between side chains at positions 16 and 20
  MOD_RES (24)..(24): Cys-PEG
HSQGTFTSDYSKYLDEQAAKEFICWLVKG

SEQ ID NO: 223 - protein, 29 aa, Artificial Sequence
  glucagon analog
  MISC_FEATURE: c-term amidation
  MOD_RES (1)..(1): (Des-amino)His
  MOD_RES (24)..(24): Cys-PEG
XSQGTFTSDYSKYLDERRAQDFVCWLMNT

SEQ ID NO: 224 - protein, 29 aa, Artificial Sequence
  glucagon analog
  MISC_FEATURE: c-term amidation
  MOD_RES (1)..(1): (Des-amino)His
  MOD_RES (24)..(24): Cys-PEG
XSQGTFTSDYSKYLDERRAKDFVCWLMNT

SEQ ID NO: 225 - protein, 29 aa, Artificial Sequence
  glucagon analog
  MISC_FEATURE: c-term amidation
  MOD_RES (1)..(1): (Des-amino)His
  MISC_FEATURE (16)..(20): Lactam ring between side chains at positions 16 and 20
  MOD_RES (24)..(24): Cys-PEG
XSQGTFTSDYSKYLDERRAKDFVCWLMNT

SEQ ID NO: 226 - protein, 29 aa, Artificial Sequence
  glucagon analog
  MISC_FEATURE: c-term amidation
  MOD_RES (1)..(1): (Des-amino)His
  MISC_FEATURE (12)..(16): Lactam ring between side chains at positions 12 and 16
  MOD_RES (24)..(24): Cys-PEG
XSQGTFTSDYSKYLDERRAQDFVCWLMNT

SEQ ID NO: 227 - protein, 29 aa, Artificial Sequence
  glucagon analog
  MISC_FEATURE: c-term amidation
  MOD_RES (1)..(1): (Des-amino)His
  MISC_FEATURE (12)..(16): Lactam ring between side chains at positions 12 and 16
  MOD_RES (24)..(24): Cys-PEG
XSQGTFTSDYSKYLDERRAKDFVCWLMNT

SEQ ID NO: 228 - protein, 29 aa, Artificial Sequence
  glucagon analog
  MISC_FEATURE: c-term amidation
  MOD_RES (1)..(1): (Des-amino)His
  MISC_FEATURE (16)..(20): Lactam ring between side chains at positions 16 and 20
  MOD_RES (24)..(24): Cys-PEG
XSQGTFTSDYSKYLDKRRAEDFVCWLMNT

SEQ ID NO: 229 - protein, 29 aa, Artificial Sequence
  glucagon analog
  MISC_FEATURE: c-term amidation
  MOD_RES (1)..(1): (Des-amino)His
  MOD_RES (24)..(24): Cys-PEG
XSQGTFTSDYSKYLDERAAKDFVCWLMNT

SEQ ID NO: 230 - protein, 29 aa, Artificial Sequence
  glucagon analog
  MISC_FEATURE: c-term amidation
  MOD_RES (1)..(1): (Des-amino)His
  MISC_FEATURE (16)..(20): Lactam ring between side chains at positions 16 and 20
  MOD_RES (24)..(24): Cys-PEG
XSQGTFTSDYSKYLDERAAKDFVCWLMNT

SEQ ID NO: 231 - protein, 29 aa, Artificial Sequence
  glucagon analog
  MISC_FEATURE: c-term amidation; lactam ring between side chains at positions 12 and 16
  MOD_RES (1)..(1): (Des-amino)His
  MOD_RES (24)..(24): Cys-PEG
XSQGTFTSDYSKYLDERAAQDFVCWLMNT

SEQ ID NO: 232 - protein, 29 aa, Artificial Sequence
  glucagon analog
  MISC_FEATURE: c-term amidation
  MOD_RES (1)..(1): (Des-amino)His
  MISC_FEATURE (12)..(16): Lactam ring between side chains at positions 12 and 16
  MOD_RES (24)..(24): Cys-PEG
XSQGTFTSDYSKYLDERAAKDFVCWLMNT

SEQ ID NO: 233 - protein, 29 aa, Artificial Sequence
  glucagon analog
  MISC_FEATURE: c-term amidation
  MOD_RES (1)..(1): (Des-amino)His
  MISC_FEATURE (16)..(20): Lactam ring between side chains at positions 16 and 20
  MOD_RES (24)..(24): Cys-PEG
XSQGTFTSDYSKYLDKRAAEDFVCWLMNT

SEQ ID NO: 234 - protein, 29 aa, Artificial Sequence
  glucagon analog
  MISC_FEATURE: c-term amidation
  MOD_RES (1)..(1): (Des-amino)His
  MOD_RES (24)..(24): Cys-PEG
XSQGTFTSDYSKYLDEQAAKEFICWLMNT

SEQ ID NO: 235 - protein, 29 aa, Artificial Sequence
  glucagon analog
  MISC_FEATURE: c-term amidation
  MOD_RES (1)..(1): (Des-amino)His
  MISC_FEATURE (12)..(16): Lactam ring between side chains at positions 12 and 16
  MOD_RES (24)..(24): Cys-PEG
XSQGTFTSDYSKYLDEQAAKEFICWLMNT

SEQ ID NO: 236 - protein, 29 aa, Artificial Sequence
  glucagon analog
  MISC_FEATURE: c-term amidation
  MOD_RES (1)..(1): (Des-amino)His
  MISC_FEATURE (16)..(20): Lactam ring between side chains at positions 16 and 20
  MOD_RES (24)..(24): Cys-PEG
XSQGTFTSDYSKYLDEQAAKEFICWLMNT

SEQ ID NO: 237 - protein, 29 aa, Artificial Sequence
  glucagon analog
  MISC_FEATURE: c-term amidation
  MOD_RES (1)..(1): (Des-amino)His
  MOD_RES (24)..(24): Cys-PEG
XSQGTFTSDYSKYLDEQAAKEFICWLVKG

SEQ ID NO: 238 - protein, 29 aa, Artificial Sequence
  glucagon analog
  MISC_FEATURE: c-term amidation
  MOD_RES (1)..(1): (Des-amino)His
  MISC_FEATURE (12)..(16): Lactam ring between side chains at positions 12 and 16
  MOD_RES (24)..(24): Cys-PEG
XSQGTFTSDYSKYLDEQAAKEFICWLVKG

SEQ ID NO: 239 - protein, 29 aa, Artificial Sequence
  glucagon analog
  MISC_FEATURE: c-term amidation
  MOD_RES (1)..(1): (Des-amino)His
  MISC_FEATURE (16)..(20): Lactam ring between side chains at positions 16 and 20
  MOD_RES (24)..(24): Cys-PEG
XSQGTFTSDYSKYLDEQAAKEFICWLVKG

SEQ ID NO: 240 - protein, 29 aa, Artificial Sequence
  Synthetic peptide
  MISC_FEATURE: c-term amidation
  MOD_RES (2)..(2): Aminoisobutyric acid
  MOD_RES (24)..(24): Cys-PEG
HXQGTFTSDYSKYLDERRAQDFVCWLMNT

SEQ ID NO: 241 - protein, 29 aa, Artificial Sequence
  Synthetic peptide
  MISC_FEATURE: c-term amidation
  MOD_RES (2)..(2): Aminoisobutyric acid
  MOD_RES (24)..(24): Cys-PEG
HXQGTFTSDYSKYLDERRAKDFVCWLMNT

SEQ ID NO: 242 - protein, 29 aa, Artificial Sequence
  Synthetic peptide
  MISC_FEATURE: c-term amidation
  MOD_RES (2)..(2): Aminoisobutyric acid
  MISC_FEATURE (16)..(20): Lactam ring between side chains at positions 16 and 20
  MOD_RES (24)..(24): Cys-PEG
HXQGTFTSDYSKYLDERRAKDFVCWLMNT

SEQ ID NO: 243 - protein, 29 aa, Artificial Sequence
  Synthetic peptide
  MISC_FEATURE: c-term amidation
  MOD_RES (2)..(2): Aminoisobutyric acid
  MISC_FEATURE (12)..(16): Lactam ring between side chains at positions 12 and 16
  MOD_RES (24)..(24): Cys-PEG
HXQGTFTSDYSKYLDERRAQDFVCWLMNT

SEQ ID NO: 244 - protein, 29 aa, Artificial Sequence
  Synthetic peptide
  MISC_FEATURE: c-term amidation
  MOD_RES (2)..(2): Aminoisobutyric acid
  MISC_FEATURE (12)..(16): Lactam ring between side chains at positions 12 and 16
  MOD_RES (24)..(24): Cys-PEG
HXQGTFTSDYSKYLDERRAKDFVCWLMNT

SEQ ID NO: 245 - protein, 29 aa, Artificial Sequence
  Synthetic peptide
  MISC_FEATURE: c-term amidation
  MOD_RES (2)..(2): Aminoisobutyric acid
  MISC_FEATURE (16)..(20): Lactam ring side chains at positions 16 and 20
  MOD_RES (24)..(24): Cys-PEG
HXQGTFTSDYSKYLDKRRAEDFVCWLMNT

SEQ ID NO: 246 - protein, 29 aa, Artificial Sequence
  Synthetic peptide
  MISC_FEATURE: c-term amidation
  MOD_RES (2)..(2): Aminoisobutyric acid
  MOD_RES (24)..(24): Cys-PEG
HXQGTFTSDYSKYLDERAAKDFVCWLMNT

SEQ ID NO: 247 - protein, 29 aa, Artificial Sequence
  Synthetic peptide
  MISC_FEATURE: c-term amidation
  MOD_RES (2)..(2): Aminoisobutyric acid
  MISC_FEATURE (16)..(20): Lactam ring between side chains at positions 16 and 20
  MOD_RES (24)..(24): Cys-PEG
HXQGTFTSDYSKYLDERAAKDFVCWLMNT

SEQ ID NO: 248 - protein, 29 aa, Artificial Sequence
  Synthetic peptide
  MISC_FEATURE: c-term amidation
  MOD_RES (2)..(2): Aminoisobutyric acid
  MISC_FEATURE (12)..(16): Lactam ring between side chains at positions 12 and 16
  MOD_RES (24)..(24): Cys-PEG
HXQGTFTSDYSKYLDERAAQDFVCWLMNT

SEQ ID NO: 249 - protein, 29 aa, Artificial Sequence
  Synthetic peptide
  MISC_FEATURE: c-term amidation
  MOD_RES (2)..(2): Aminoisobutyric acid
  MISC_FEATURE (12)..(16): Lactam ring between side chains at positions 12 and 16
  MOD_RES (24)..(24): Cys-PEG
HXQGTFTSDYSKYLDERAAKDFVCWLMNT

SEQ ID NO: 250 - protein, 29 aa, Artificial Sequence
  Synthetic peptide
  MISC_FEATURE: c-term amidation
  MOD_RES (2)..(2): Aminoisobutyric acid
  MISC_FEATURE (12)..(16): Lactam ring between side chains at positions 12 and 16
  MOD_RES (24)..(24): Cys-PEG
HXQGTFTSDYSKYLDKRAAEDFVCWLMNT

SEQ ID NO: 251 - protein, 29 aa, Artificial Sequence
  Synthetic peptide
  MISC_FEATURE: c-term amidation
  MOD_RES (2)..(2): Aminoisobutyric acid
  MOD_RES (24)..(24): Cys-PEG
HXQGTFTSDYSKYLDEQAAKEFICWLMNT

SEQ ID NO: 252 - protein, 29 aa, Artificial Sequence
  Synthetic peptide
  misc_feature (2)..(2): Xaa can be any naturally occurring amino acid
HXQGTFTSDYSKYLDEQAAKEFICWLMNT

SEQ ID NO: 253 - protein, 29 aa, Artificial Sequence
  Synthetic peptide
  MISC_FEATURE: c-term amidation
  MOD_RES (2)..(2): Aminoisobutyric acid
  MISC_FEATURE (16)..(20): Lactam ring between side chains at positions 16 and 20
  MOD_RES (24)..(24): Cys-PEG
HXQGTFTSDYSKYLDEQAAKEFICWLMNT

SEQ ID NO: 254 - protein, 29 aa, Artificial Sequence
  Synthetic peptide
  MISC_FEATURE: c-term amidation
  MOD_RES (2)..(2): Aminoisobutyric acid
  MOD_RES (24)..(24): Cys-PEG
HXQGTFTSDYSKYLDEQAAKEFICWLVKG

SEQ ID NO: 255 - protein, 29 aa, Artificial Sequence
  Synthetic peptide
  MISC_FEATURE: c-term amidation
  MOD_RES (2)..(2): Aminoisobutyric acid
  MISC_FEATURE (12)..(16): Lactam ring between side chains at positions 12 and 16
  MOD_RES (24)..(24): Cys-PEG
HXQGTFTSDYSKYLDEQAAKEFICWLVKG

SEQ ID NO: 256 - protein, 29 aa, Artificial Sequence
  Synthetic peptide
  MISC_FEATURE: c-term amidation
  MOD_RES (2)..(2): Aminoisobutyric acid
  MISC_FEATURE (16)..(20): Lactam ring between side chains at positions 16 and 20
  MOD_RES (24)..(24): Cys-PEG
HXQGTFTSDYSKYLDEQAAKEFICWLVKG

SEQ ID NO: 257 - protein, 29 aa, Artificial Sequence
  Synthetic peptide
  MISC_FEATURE: c-term amidation
  MOD_RES (2)..(2): D-Ala
  MOD_RES (24)..(24): Cys-PEG
HXQGTFTSDYSKYLDERRAQDFVCWLMNT

SEQ ID NO: 258 - protein, 29 aa, Artificial Sequence
  Synthetic peptide
  MISC_FEATURE: c-term amidation
  MOD_RES (2)..(2): D-Ala
  MOD_RES (24)..(24): Cys-PEG
HXQGTFTSDYSKYLDERRAKDFVCWLMNT

SEQ ID NO: 259 - protein, 29 aa, Artificial Sequence
  Synthetic peptide
  MISC_FEATURE: c-term amidation
  MOD_RES (2)..(2): D-Ala
  MISC_FEATURE (16)..(20): Lactam ring between side chains at positions 16 and 20
  MOD_RES (24)..(24): Cys-PEG
HXQGTFTSDYSKYLDERRAKDFVCWLMNT

SEQ ID NO: 260 - protein, 29 aa, Artificial Sequence
  Synthetic peptide
  MISC_FEATURE: c-term amidation
  MOD_RES (2)..(2): D-Ala
  MISC_FEATURE (12)..(16): Lactam ring between side chrains at positions 12 and 16
  MOD_RES (24)..(24): Cys-PEG
HXQGTFTSDYSKYLDERRAQDFVCWLMNT

SEQ ID NO: 261 - protein, 29 aa, Artificial Sequence
  Synthetic peptide
  MISC_FEATURE: c-term amidation; lactam ring between side chains at positions 12 and 16
  MOD_RES (2)..(2): D-Ala
  MOD_RES (24)..(24): Cys-PEG
HXQGTFTSDYSKYLDERRAKDFVCWLMNT

SEQ ID NO: 262 - protein, 29 aa, Artificial Sequence
  Synthetic peptide
  MISC_FEATURE: c-term amidation
  MOD_RES (2)..(2): D-Ala
  MISC_FEATURE (16)..(20): Lactam ring between side chains at positions 16 and 20
  MOD_RES (24)..(24): Cys-PEG
HXQGTFTSDYSKYLDKRRAEDFVCWLMNT

SEQ ID NO: 263 - protein, 29 aa, Artificial Sequence
  Synthetic peptide
  MISC_FEATURE: c-term amidation
  MOD_RES (2)..(2): D-Ala
  MOD_RES (24)..(24): Cys-PEG
HXQGTFTSDYSKYLDERAAKDFVCWLMNT

SEQ ID NO: 264 - protein, 29 aa, Artificial Sequence
  Synthetic peptide
  MISC_FEATURE: c-term amidation
  MOD_RES (2)..(2): D-Ala
  MISC_FEATURE (16)..(20): Lactam ring between side chains at positions 16 and 20
  MOD_RES (24)..(24): Cys-PEG
HXQGTFTSDYSKYLDERAAKDFVCWLMNT

SEQ ID NO: 265 - protein, 29 aa, Artificial Sequence
  Synthetic peptide
  MISC_FEATURE: c-term amidation
  MOD_RES (2)..(2): D-Ala
  MISC_FEATURE (12)..(16): Lactam ring between side chains at positions 12 and 16
  MOD_RES (24)..(24): Cys-PEG
HXQGTFTSDYSKYLDERAAQDFVCWLMNT

SEQ ID NO: 266 - protein, 29 aa, Artificial Sequence
  Synthetic peptide
  MISC_FEATURE: c-term amidation
  MOD_RES (2)..(2): D-Ala
  MISC_FEATURE (12)..(16): Lactam ring betwee side chains at positions 12 and 16
  MOD_RES (24)..(24): Cys-PEG
HXQGTFTSDYSKYLDERAAKDFVCWLMNT

SEQ ID NO: 267 - protein, 29 aa, Artificial Sequence
  Synthetic peptide
  MISC_FEATURE: c-term amidation
  MOD_RES (2)..(2): D-Ala
  MISC_FEATURE (16)..(20): Lactam ring between side chains at positions 16 and 20
  MOD_RES (24)..(24): Cys-PEG
HXQGTFTSDYSKYLDKRAAEDFVCWLMNT

SEQ ID NO: 268 - protein, 29 aa, Artificial Sequence
  Synthetic peptide
  MISC_FEATURE: c-term amidation
  MOD_RES (2)..(2): D-Ala
  MOD_RES (24)..(24): Cys-PEG
HXQGTFTSDYSKYLDEQAAKEFICWLMNT

SEQ ID NO: 269 - protein, 29 aa, Artificial Sequence
  Synthetic peptide
  MISC_FEATURE: c-term amidation
  MOD_RES (2)..(2): D-Ala
  MISC_FEATURE (12)..(16): Lactam ring betwee side chains at positions 12 and 16
  MOD_RES (24)..(24): Cys-PEG
HXQGTFTSDYSKYLDEQAAKEFICWLMNT

SEQ ID NO: 270 - protein, 29 aa, Artificial Sequence
  Synthetic peptide
  MISC_FEATURE: c-term amidation
  MOD_RES (2)..(2): D-Ala
  MISC_FEATURE (16)..(20): Lactam ring betwee side chains at positions 16 and 20
  MOD_RES (24)..(24): Cys-PEG
HXQGTFTSDYSKYLDEQAAKEFICWLMNT

SEQ ID NO: 271 - protein, 29 aa, Artificial Sequence
  Synthetic peptide
  MISC_FEATURE: c-term amidation
  MOD_RES (2)..(2): D-Ala
  MOD_RES (24)..(24): Cys-PEG
HXQGTFTSDYSKYLDEQAAKEFICWLVKG

SEQ ID NO: 272 - protein, 29 aa, Artificial Sequence
  Synthetic peptide
  MISC_FEATURE: c-term amidation
  MOD_RES (2)..(2): D-Ala
  MISC_FEATURE (12)..(16): Lactam ring between side chains at positions 12 and 16
  MOD_RES (24)..(24): Cys-PEG
HXQGTFTSDYSKYLDEQAAKEFICWLVKG

SEQ ID NO: 273 - protein, 29 aa, Artificial Sequence
  Synthetic peptide
  MISC_FEATURE: c-term amidation
  MOD_RES (2)..(2): D-Ala
  MISC_FEATURE (16)..(20): Lactam ring between side chains at positions 16 and 20
  MOD_RES (24)..(24): Cys-PEG
HXQGTFTSDYSKYLDEQAAKEFICWLVKG

SEQ ID NO: 274 - protein, 29 aa, Artificial Sequence
  Synthetic peptide
  MISC_FEATURE: c-term amidation
  MOD_RES (24)..(24): Cys-PEG
HSEGTFTSDYSKYLDERRAQDFVCWLMNT

SEQ ID NO: 275 - protein, 29 aa, Artificial Sequence
  Synthetic peptide
  MISC_FEATURE: c-term amidation
  MOD_RES (24)..(24): Cys-PEG
HSEGTFTSDYSKYLDERRAKDFVCWLMNT

SEQ ID NO: 276 - protein, 29 aa, Artificial Sequence
  Synthetic peptide
  MISC_FEATURE: c-term amidation
  MISC_FEATURE (16)..(20): Lactam ring between side chains at positions 16 and 20
  MOD_RES (24)..(24): Cys-PEG
HSEGTFTSDYSKYLDERRAKDFVCWLMNT

SEQ ID NO: 277 - protein, 29 aa, Artificial Sequence
  Synthetic peptide
  MISC_FEATURE: c-term amidation
  MISC_FEATURE (12)..(16): Lactam ring between side chains at positions 12 and 16
  MOD_RES (24)..(24): Cys-PEG
HSEGTFTSDYSKYLDERRAQDFVCWLMNT

SEQ ID NO: 278 - protein, 29 aa, Artificial Sequence
  Synthetic peptide
  MISC_FEATURE: c-term amidation
  MISC_FEATURE (12)..(16): Lactam ring between side chains at positions 12 and 16
  MOD_RES (24)..(24): Cys-PEG
HSEGTFTSDYSKYLDERRAKDFVCWLMNT

SEQ ID NO: 279 - protein, 29 aa, Artificial Sequence
  Synthetic peptide
  MISC_FEATURE: c-term amidation
  MISC_FEATURE (16)..(20): Lactam ring between side chains at positions 16 and 20
  MOD_RES (24)..(24): Cys-PEG
HSEGTFTSDYSKYLDKRRAEDFVCWLMNT

SEQ ID NO: 280 - protein, 29 aa, Artificial Sequence
  Synthetic peptide
  MISC_FEATURE: c-term amidation
  MOD_RES (24)..(24): Cys-PEG
HSEGTFTSDYSKYLDERAAKDFVCWLMNT

SEQ ID NO: 281 - protein, 29 aa, Artificial Sequence
  Synthetic peptide
  MISC_FEATURE: c-term amidation
  MISC_FEATURE (16)..(20): Lactam ring between side chains at positions 16 and 20
  MOD_RES (24)..(24): Cys-PEG
HSEGTFTSDYSKYLDERAAKDFVCWLMNT

SEQ ID NO: 282 - protein, 29 aa, Artificial Sequence
  Synthetic peptide
  MISC_FEATURE: c-term amidation
  MISC_FEATURE (12)..(16): Lactam ring between side chains at positions 12 and 16
  MOD_RES (24)..(24): Cys-PEG
HSEGTFTSDYSKYLDERAAQDFVCWLMNT

SEQ ID NO: 283 - protein, 29 aa, Artificial Sequence
  Synthetic peptide
  MISC_FEATURE: c-term amidation
  MISC_FEATURE (12)..(16): Lactam ring between side chains at positions 12 and 16
  MOD_RES (24)..(24): Cys-PEG
HSEGTFTSDYSKYLDERAAKDFVCWLMNT

SEQ ID NO: 284 - protein, 29 aa, Artificial Sequence
  Synthetic peptide
  MISC_FEATURE: c-term amidation
  MISC_FEATURE (16)..(20): Lactam ring between side chains at positions 16 and 20
  MOD_RES (24)..(24): Cys-PEG
HSEGTFTSDYSKYLDKRAAEDFVCWLMNT

SEQ ID NO: 285 - protein, 29 aa, Artificial Sequence
  Synthetic peptide
  MISC_FEATURE: c-term amidation
  MOD_RES (24)..(24): Cys-PEG
HSEGTFTSDYSKYLDEQAAKEFICWLMNT

SEQ ID NO: 286 - protein, 29 aa, Artificial Sequence
  Synthetic peptide
  MISC_FEATURE: c-term amidation
  MISC_FEATURE (12)..(16): Lactam ring between side chains at positions 12 and 16
  MOD_RES (24)..(24): Cys-PEG
HSEGTFTSDYSKYLDEQAAKEFICWLMNT

SEQ ID NO: 287 - protein, 29 aa, Artificial Sequence
  Synthetic peptide
  MISC_FEATURE: c-term amidation
  MISC_FEATURE (16)..(20): Lactam ring between side chain at positions 16 and 20
  MOD_RES (24)..(24): Cys-PEG
HSEGTFTSDYSKYLDEQAAKEFICWLMNT

SEQ ID NO: 288 - protein, 29 aa, Artificial Sequence
  Synthetic peptide
  MISC_FEATURE: c-term amidation
  MOD_RES (24)..(24): Cys-PEG
HSEGTFTSDYSKYLDEQAAKEFICWLVKG

SEQ ID NO: 289 - protein, 29 aa, Artificial Sequence
  Synthetic peptide
  MISC_FEATURE: c-term amidation
  MISC_FEATURE (12)..(16): Lactam ring between side chains at positions 12 and 16
  MOD_RES (24)..(24): Cys-PEG
HSEGTFTSDYSKYLDEQAAKEFICWLVKG

SEQ ID NO: 290 - protein, 29 aa, Artificial Sequence
  Synthetic peptide
  MISC_FEATURE: c-term amidation
  MISC_FEATURE (16)..(20): Lactam ring between side chains at positions 16 and 20
  MOD_RES (24)..(24): Cys-PEG
HSEGTFTSDYSKYLDEQAAKEFICWLVKG

SEQ ID NO: 291 - protein, 29 aa, Artificial Sequence
  Synthetic peptide
  MISC_FEATURE: c-term amidation
  MOD_RES (1)..(1): (Des-amino)His
  MOD_RES (24)..(24): Cys-PEG
XSEGTFTSDYSKYLDERRAQDFVCWLMNT

SEQ ID NO: 292 - protein, 29 aa, Artificial Sequence
  Synthetic peptide
  MISC_FEATURE: c-term amidation
  MOD_RES (1)..(1): (Des-amino)His
  MOD_RES (24)..(24): Cys-PEG
XSEGTFTSDYSKYLDERRAKDFVCWLMNT

SEQ ID NO: 293 - protein, 29 aa, Artificial Sequence
  Synthetic peptide
  MISC_FEATURE: c-term amidation
  MOD_RES (1)..(1): (Des-amino)His
  MISC_FEATURE (16)..(20): Lactam ring between side chains at positions 16 and 20
  MOD_RES (24)..(24): Cys-PEG
XSEGTFTSDYSKYLDERRAKDFVCWLMNT

SEQ ID NO: 294 - protein, 29 aa, Artificial Sequence
  Synthetic peptide
  MISC_FEATURE: c-term amidation
  MOD_RES (1)..(1): (Des-amino)His
  MISC_FEATURE (12)..(16): Lactam ring between side chains at positions 12 and 16
  MOD_RES (24)..(24): Cys-PEG
XSEGTFTSDYSKYLDERRAQDFVCWLMNT

SEQ ID NO: 295 - protein, 29 aa, Artificial Sequence
  Synthetic peptide
  MISC_FEATURE: c-term amidation
  MOD_RES (1)..(1): (Des-amino)His
  MISC_FEATURE (12)..(16): Lactam ring between side chains at positions 12 and 16
  MOD_RES (24)..(24): Cys-PEG
XSEGTFTSDYSKYLDERRAKDFVCWLMNT

SEQ ID NO: 296 - protein, 29 aa, Artificial Sequence
  Synthetic peptide
  MISC_FEATURE: c-term amidation
  MOD_RES (1)..(1): (Des-amino)His
  MISC_FEATURE (16)..(20): Lactam ring between side chains at positions 16 and 20
  MOD_RES (24)..(24): Cys-PEG
XSEGTFTSDYSKYLDKRRAEDFVCWLMNT

SEQ ID NO: 297 - protein, 29 aa, Artificial Sequence
  Synthetic peptide
  MISC_FEATURE: c-term amidation
  MOD_RES (1)..(1): (Des-amino)His
  MOD_RES (24)..(24): Cys-PEG
XSEGTFTSDYSKYLDERAAKDFVCWLMNT

SEQ ID NO: 298 - protein, 29 aa, Artificial Sequence
  Synthetic peptide
  MISC_FEATURE: c-term amidation
  MOD_RES (1)..(1): (Des-amino)His
  MISC_FEATURE (16)..(20): Lactam ring between side chains at positions 16 and 20
  MOD_RES (24)..(24): Cys-PEG
XSEGTFTSDYSKYLDERAAKDFVCWLMNT

SEQ ID NO: 299 - protein, 29 aa, Artificial Sequence
  Synthetic peptide
  MISC_FEATURE: c-term amidation
  MOD_RES (1)..(1): (Des-amino)His
  MISC_FEATURE (12)..(16): Lactam ring between side chains at positions 12 and 16
  MOD_RES (24)..(24): Cys-PEG
XSEGTFTSDYSKYLDERAAQDFVCWLMNT

SEQ ID NO: 300 - protein, 29 aa, Artificial Sequence
  Synthetic peptide
  MISC_FEATURE: c-term amidation
  MOD_RES (1)..(1): (Des-amino)His
  MISC_FEATURE (12)..(16): Lactam ring between side chains at positions 12 and 16
  MOD_RES (24)..(24): Cys-PEG
XSEGTFTSDYSKYLDERAAKDFVCWLMNT

SEQ ID NO: 301 - protein, 29 aa, Artificial Sequence
  Synthetic peptide
  MISC_FEATURE: c-term amidation
  MOD_RES (1)..(1): (Des-amino)His
  MISC_FEATURE (16)..(20): Lactam ring between side chains at positions 16 and 20
  MOD_RES (24)..(24): Cys-PEG
XSEGTFTSDYSKYLDKRAAEDFVCWLMNT

SEQ ID NO: 302 - protein, 29 aa, Artificial Sequencce
  Synthetic peptide
  MISC_FEATURE: c-term amidation
  MOD_RES (1)..(1): (Des-amino)His
  MOD_RES (24)..(24): Cys-PEG
XSEGTFTSDYSKYLDEQAAKGFICWLMNT

SEQ ID NO: 303 - protein, 29 aa, Artificial Sequence
  Synthetic peptide
  MISC_FEATURE: c-term amidation
  MOD_RES (1)..(1): (Des-amino)His
  MISC_FEATURE (12)..(16): Lactam ring between side chains at positions 12 and 16
  MOD_RES (24)..(24): Cys-PEG
XSEGTFTSDYSKYLDEQAAKGFICWLMNT

SEQ ID NO: 304 - protein, 29 aa, Artificial Sequence
  Synthetic peptide
  MISC_FEATURE: c-term amidation
  MOD_RES (1)..(1): (Des-amino)His
  MISC_FEATURE (16)..(20): Lactam ring between side chains at positions 16 and 20
  MOD_RES (24)..(24): Cys-PEG
XSEGTFTSDYSKYLDEQAAKGFICWLMNT

SEQ ID NO: 305 - protein, 29 aa, Artificial Sequencce
  Synthetic peptide
  MISC_FEATURE: c-term amidation
  MOD_RES (1)..(1): (des-amino)His
  MOD_RES (24)..(24): Cys-PEG
XSEGTFTSDYSKYLDEQAAKGFICWLVKG

SEQ ID NO: 306 - protein, 29 aa, Artificial Sequence
  Synthetic peptide
  MISC_FEATURE: c-term amidation
  MOD_RES (1)..(1): (Des-amino)His
  MISC_FEATURE (12)..(16): Lactam ring between side chains at positions 12 and 16
  MOD_RES (24)..(24): Cys-PEG
XSEGTFTSDYSKYLDEQAAKGFICWLVKG

SEQ ID NO: 307 - protein, 29 aa, Artificial Sequence
  Synthetic peptide
  MISC_FEATURE: c-term amidation
  MOD_RES (1)..(1): (Des-amino)His
  MISC_FEATURE (16)..(20): Lactam ring between side chains at positions 16 and 20
  MOD_RES (24)..(24): Cys-PEG
XSEGTFTSDYSKYLDEQAAKGFICWLVKG

SEQ ID NO: 308 - protein, 29 aa, Artificial Sequence
  Synthetic peptide
  MISC_FEATURE: c-term amidation
  MOD_RES (2)..(2): Aminoisobutyric acid
  MOD_RES (24)..(24): Cys-PEG
HXEGTFTSDYSKYLDERRAQDFVCWLMNT

SEQ ID NO: 309 - protein, 29 aa, Artificial Sequence
  Synthetic peptide
  MISC_FEATURE: c-term amidation
  MOD_RES (2)..(2): Aminoisobutyric acid
  MOD_RES (24)..(24): Cys-PEG
HXEGTFTSDYSKYLDERRAKDFVCWLMNT

SEQ ID NO: 310 - protein, 29 aa, Artificial Sequence
  Synthetic peptide
  MISC_FEATURE: c-term amidation
  MOD_RES (2)..(2): Aminoisobutyric acid
  MISC_FEATURE (16)..(20): Lactam ring between side chains at positions 16 and 20
  MOD_RES (24)..(24): Cys-PEG
HXEGTFTSDYSKYLDERRAKDFVCWLMNT

SEQ ID NO: 311 - protein, 29 aa, Artificial Sequence
  Synthetic peptide
  MISC_FEATURE: c-term amidation
  MOD_RES (2)..(2): Aminoisobutyric acid
  MISC_FEATURE (12)..(16): Lactam ring between side chain at positions 12 and 16
  MOD_RES (24)..(24): Cys-PEG
HXEGTFTSDYSKYLDERRAQDFVCWLMNT

SEQ ID NO: 312 - protein, 29 aa, Artificial Sequence
  Synthetic peptide
  MISC_FEATURE: c-term amidation
  MOD_RES (2)..(2): Aminoisobutyric acid
  MISC_FEATURE (12)..(16): Lactam ring between side chains at positions 12 and 16
  MOD_RES (24)..(24): Cys-PEG
HXEGTFTSDYSKYLDERRAKDFVCWLMNT

SEQ ID NO: 313 - protein, 29 aa, Artificial Sequence
  Synthetic peptide
  MISC_FEATURE: c-term amidation
  MOD_RES (2)..(2): Aminoisobutyric acid
  MISC_FEATURE (16)..(20): Lactam ring between side chains at positions 16 and 20
  MOD_RES (24)..(24): Cys-PEG
HXEGTFTSDYSKYLDKRRAEDFVCWLMNT

SEQ ID NO: 314 - protein, 29 aa, Artificial Sequence
  Synthetic peptide
  MISC_FEATURE: c-term amidation
  MOD_RES (2)..(2): Aminoisobutyric acid
  MOD_RES (24)..(24): Cys-PEG
HXEGTFTSDYSKYLDERAAKDFVCWLMNT

SEQ ID NO: 315 - protein, 29 aa, Artificial Sequence
  Synthetic peptide
  MISC_FEATURE: c-term amidation
  MOD_RES (2)..(2): Aminoisobutyric acid
  MISC_FEATURE (16)..(20): Lactam ring between seide chains at positions 16 and 20
  MOD_RES (24)..(24): Cys-PEG
HXEGTFTSDYSKYLDERAAKDFVCWLMNT

SEQ ID NO: 316 - protein, 29 aa, Artificial Sequence
  Synthetic peptide
  MISC_FEATURE: c-term amidation
  MOD_RES (2)..(2): Aminoisobutyric acid
  MISC_FEATURE (12)..(16): Lactam ring between side chains at positions 12 and 16
  MOD_RES (24)..(24): Cys-PEG
HXEGTFTSDYSKYLDERAAQDFVCWLMNT

SEQ ID NO: 317 - protein, 29 aa, Artificial Sequence
  Synthetic peptide
  MISC_FEATURE: c-term amidation
  MOD_RES (2)..(2): Aminoisobutyric acid
  MISC_FEATURE (12)..(16): Lactam ring between side chains at positions 12 adn 16
  MOD_RES (24)..(24): Cys-PEG
HXEGTFTSDYSKYLDERAAKDFVCWLMNT

SEQ ID NO: 318 - protein, 29 aa, Artificial Sequence
  Synthetic peptide
  MISC_FEATURE: c-term amidation
  MOD_RES (2)..(2): Aminoisobutyric acid
  MISC_FEATURE (16)..(20): Lactam ring between side chains at positions 16 and 20
  MOD_RES (24)..(24): Cys-PEG
HXEGTFTSDYSKYLDKRAAEDFVCWLMNT

SEQ ID NO: 319 - protein, 29 aa, Artificial Sequence
  Synthetic peptide
  MISC_FEATURE: c-term amidation
  MOD_RES (2)..(2): Aminoisobutyric acid
  MOD_RES (24)..(24): Cys-PEG
HXEGTFTSDYSKYLDEQAAKEFICWLMNT

SEQ ID NO: 320 - protein, 29 aa, Artificial Sequence
  Synthetic peptide
  MISC_FEATURE: c-term amidation
  MOD_RES (2)..(2): Aminoisobutyric acid
  MISC_FEATURE (12)..(16): Lactam ring between side chains at positions 12 and 16
  MOD_RES (24)..(24): Cys-PEG
HXEGTFTSDYSKYLDEQAAKEFICWLMNT

SEQ ID NO: 321 - protein, 29 aa, Artificial Sequence
  Synthetic peptide
  MISC_FEATURE: c-term amidation
  MOD_RES (2)..(2): Aminoisobutyric acid
  MISC_FEATURE (16)..(20): Lactam ring between side chains at position 16 and 20
  MOD_RES (24)..(24): Cys-PEG
HXEGTFTSDYSKYLDEQAAKEFICWLMNT

SEQ ID NO: 322 - protein, 29 aa, Artificial Sequence
  Synthetic peptide
  MISC_FEATURE: c-term amidation
  MOD_RES (2)..(2): Aminoisobutyric acid
  MOD_RES (24)..(24): Cys-PEG
HXEGTFTSDYSKYLDEQAAKEFICWLVKG

SEQ ID NO: 323 - protein, 29 aa, Artificial Sequence
  Synthetic peptide
  MISC_FEATURE: c-term amidation
  MOD_RES (2)..(2): Aminoisobutyric acid
  MISC_FEATURE (12)..(16): Lactam ring between side chains at positions 12 and 16
  MOD_RES (24)..(24): Cys-PEG
HXEGTFTSDYSKYLDEQAAKEFICWLVKG

SEQ ID NO: 324 - protein, 29 aa, Artificial Sequence
  Synthetic peptide
  MISC_FEATURE: c-term amidation
  MOD_RES (2)..(2): Aminoisobutyric acid
  MISC_FEATURE (16)..(20): Lactam ring between side chains at position 16 and 20
  MOD_RES (24)..(24): Cys-PEG
HXEGTFTSDYSKYLDEQAAKEFICWLVKG

SEQ ID NO: 325 - protein, 29 aa, Artificial Sequence
  Synthetic peptide
  MISC_FEATURE: c-term amidation
  MOD_RES (2)..(2): D-Ala
  MOD_RES (24)..(24): Cys-PEG
HXEGTFTSDYSKYLDERRAQDFVCWLMNT

SEQ ID NO: 326 - protein, 29 aa, Artificial Sequence
  Synthetic peptide
  MISC_FEATURE: c-term amidation
  MOD_RES (2)..(2): D-Ala
  MOD_RES (24)..(24): Cys-PEG
HXEGTFTSDYSKYLDERRAKDFVCWLMNT

SEQ ID NO: 327 - protein, 29 aa, Artificial Sequence
  Synthetic peptide
  MISC_FEATURE: c-term amidation
  MOD_RES (2)..(2): D-Ala
  MISC_FEATURE (16)..(20): Lactam ring between side chains at positions 16 and 20
  MOD_RES (24)..(24): Cys-PEG
HXEGTFTSDYSKYLDERRAKDFVCWLMNT

SEQ ID NO: 328 - protein, 29 aa, Artificial Sequence
  Synthetic peptide
  MISC_FEATURE: c-term amidation
  MOD_RES (2)..(2): D-Ala
  MISC_FEATURE (12)..(16): Lactam between side chains at positions 12 and 16
  MOD_RES (24)..(24): Cys-PEG
HXEGTFTSDYSKYLDERRAQDFVCWLMNT

SEQ ID NO: 329 - protein, 29 aa, Artificial Sequence
  Synthetic peptide
  MISC_FEATURE: c-term amidation
  MOD_RES (2)..(2): D-Ala
  MISC_FEATURE (12)..(16): Lactam ring between side chains at positions 12 and 16
  MOD_RES (24)..(24): Cys-PEG
HXEGTFTSDYSKYLDERRAKDFVCWLMNT

SEQ ID NO: 330 - protein, 29 aa, Artificial Sequence
  Synthetic peptide
  MISC_FEATURE: c-term amidation
  MOD_RES (2)..(2): D-Ala
  MISC_FEATURE (16)..(20): Lactam ring between side chains at positions 16 and 20
  MOD_RES (24)..(24): Cys-PEG
HXEGTFTSDYSKYLDKRRAEDFVCWLMNT

SEQ ID NO: 331 - protein, 29 aa, Artificial Sequence
  Synthetic peptide
  MISC_FEATURE: c-term amidation
  MOD_RES (2)..(2): D-Ala
  MOD_RES (24)..(24): Cys-PEG
HXEGTFTSDYSKYLDERAAKDFVCWLMNT

SEQ ID NO: 332 - protein, 29 aa, Artificial Sequence
  Synthetic peptide
  MISC_FEATURE: c-term amidation
  MOD_RES (2)..(2): D-Ala
  MISC_FEATURE (16)..(20): Lactam ring between side chains at positions 16 and 20
  MOD_RES (24)..(24): Cys-PEG
HXEGTFTSDYSKYLDERAAKDFVCWLMNT

SEQ ID NO: 333 - protein, 29 aa, Artificial Sequence
  Synthetic peptide
  MISC_FEATURE: c-term amidation
  MOD_RES (2)..(2): D-Ala
  MISC_FEATURE (12)..(16): Lactam ring between side chains at positions 12 and 16
  MOD_RES (24)..(24): Cys-PEG
HXEGTFTSDYSKYLDERAAQDFVCWLMNT

SEQ ID NO: 334 - protein, 29 aa, Artificial Sequence
  Synthetic peptide
  MISC_FEATURE: c-term amidation
  MOD_RES (2)..(2): D-Ala
  MISC_FEATURE (12)..(16): Lactam ring between side chains at positions 12 and 16
  MOD_RES (24)..(24): Cys-PEG
HXEGTFTSDYSKYLDERAAKDFVCWLMNT

SEQ ID NO: 335 - protein, 29 aa, Artificial Sequence
  Synthetic peptide
  MISC_FEATURE: c-term amidation
  MOD_RES (2)..(2): D-Ala
  MISC_FEATURE (12)..(16): Lactam ring between side chainst at positions 16 and 20
  MOD_RES (24)..(24): Cys-PEG
HXEGTFTSDYSKYLDKRAAEDFVCWLMNT

SEQ ID NO: 336 - protein, 29 aa, Artificial Sequence
  Synthetic peptide
  MISC_FEATURE: c-term amidation
  MOD_RES (2)..(2): D-Ala
  MOD_RES (24)..(24): Cys-PEG
HXEGTFTSDYSKYLDEQAAKEFICWLMNT

SEQ ID NO: 337 - protein, 29 aa, Artificial Sequence
  Synthetic peptide
  MISC_FEATURE: c-term amidation
  MOD_RES (2)..(2): D-Ala
  MISC_FEATURE (12)..(16): Lactam ring between side chains at positions 12 and 16
  MOD_RES (24)..(24): Cys-PEG
HXEGTFTSDYSKYLDEQAAKEFICWLMNT

SEQ ID NO: 338 - protein, 29 aa, Artificial Sequence
  Synthetic peptide
  MISC_FEATURE: c-term amidation
  MOD_RES (2)..(2): D-Ala
  MISC_FEATURE (16)..(20): Lactam right between side chains at positions 16 and 20
  MOD_RES (24)..(24): Cys-PEG
HXEGTFTSDYSKYLDEQAAKEFICWLMNT

SEQ ID NO: 339 - protein, 29 aa, Artificial Sequence
  Synthetic peptide
  MISC_FEATURE: c-term amidation
  MOD_RES (2)..(2): D-Ala
  MOD_RES (24)..(24): Cys-PEG
HXEGTFTSDYSKYLDEQAAKEFICWLVKG

SEQ ID NO: 340 - protein, 29 aa, Artificial Sequence
  Synthetic peptide
  MISC_FEATURE: c-term amidation
  MOD_RES (2)..(2): D-Ala
  MISC_FEATURE (12)..(16): Lactam ring between side chains at positions 12 and 16
  MOD_RES (24)..(24): Cys-PEG
HXEGTFTSDYSKYLDEQAAKEFICWLVKG

SEQ ID NO: 341 - protein, 29 aa, Artificial Sequence
  Synthetic peptide
  MISC_FEATURE: c-term amidation
  MOD_RES (2)..(2): D-Ala
  MISC_FEATURE (16)..(20): Lactam ring between side chains at positions 16 and 20
  MOD_RES (24)..(24): Cys-PEG
HXEGTFTSDYSKYLDEQAAKEFICWLVKG

SEQ ID NO: 342 - protein, 29 aa, Artificial Sequence
  Synthetic peptide
  MISC_FEATURE: c-term amidation
  MOD_RES (16)..(16): Cys-PEG
HSQGTFTSDYSKYLDCRRAKDFVQWLMNT

SEQ ID NO: 343 - protein, 29 aa, Artificial Sequence
  Synthetic peptide
  MISC_FEATURE: c-term amidation
  MOD_RES (16)..(16): Cys-PEG
HSQGTFTSDYSKYLDCRAAKDFVQWLMNT

SEQ ID NO: 344 - protein, 29 aa, Artificial Sequence
  Synthetic peptide
  MISC_FEATURE: c-term amidation
  MOD_RES (16)..(16): Cys-PEG
HSQGTFTSDYSKYLDCQAAKEFIAWLMNT

SEQ ID NO: 345 - protein, 29 aa, Artificial Sequence
  Synthetic peptide
  MISC_FEATURE: c-term amidation
  MOD_RES (16)..(16): Cys-PEG
HSQGTFTSDYSKYLDCQAAKEFIAWLVKG

SEQ ID NO: 346 - protein, 29 aa, Artificial Sequence
  Synthetic peptide
  MISC_FEATURE: c-term amidation
  MOD_RES (1)..(1): (Des-amino)His
  MOD_RES (16)..(16): Cys-PEG
XSQGTFTSDYSKYLDCRRAKDFVQWLMNT

SEQ ID NO: 347 - protein, 29 aa, Artificial Sequence
  Synthetic peptide
  MISC_FEATURE: c-term amidation
  MOD_RES (1)..(1): (Des-amino)His
  MOD_RES (16)..(16): Cys-PEG
XSQGTFTSDYSKYLDCRAAKDFVQWLMNT

SEQ ID NO: 348 - protein, 29 aa, Artificial Sequence
  Synthetic peptide
  MISC_FEATURE: c-term amidation
  MOD_RES (1)..(1): (Des-amino)His
  MOD_RES (16)..(16): Cys-PEG
XSQGTFTSDYSKYLDCQAAKEFIAWLMNT

SEQ ID NO: 349 - protein, 29 aa, Artificial Sequence
  Synthetic peptide
  MISC_FEATURE: c-term amidation
  MOD_RES (1)..(1): (Des-amino)His
  MOD_RES (16)..(16): Cys-PEG
XSQGTFTSDYSKYLDCQAAKEFIAWLVKG

SEQ ID NO: 350 - protein, 29 aa, Artificial Sequence
  Synthetic peptide
  MISC_FEATURE: c-term amidation
  MOD_RES (1)..(1): (Des-amino)His
  MOD_RES (16)..(16): Cys-PEG
XSQGTFTSDYSKYLDCQAAKEFIAWLMNT

SEQ ID NO: 351 - protein, 29 aa, Artificial Sequence
  Synthetic peptide
  MISC_FEATURE: c-term amidation
  MOD_RES (2)..(2): Aminoisobutyric acid
  MOD_RES (16)..(16): Cys-PEG
HXQGTFTSDYSKYLDCRAAKDFVQWLMNT

SEQ ID NO: 352 - protein, 29 aa, Artificial Sequence
  Synthetic peptide
  MISC_FEATURE: c-term amidation
  MOD_RES (2)..(2): Aminoisobutyric acid
  MOD_RES (16)..(16): Cys-PEG
HXQGTFTSDYSKYLDCQAAKEFIAWLMNT

SEQ ID NO: 353 - protein, 29 aa, Artificial Sequence
  Synthetic peptide
  MISC_FEATURE: c-term amidation
  MOD_RES (2)..(2): Aminoisobutyric acid
  MOD_RES (16)..(16): Cys-PEG
HXQGTFTSDYSKYLDCQAAKEFIAWLVKG

SEQ ID NO: 354 - protein, 29 aa, Artificial Sequence
  Synthetic peptide
  MISC_FEATURE: c-term amidation
  MOD_RES (2)..(2): D-Ala
  MOD_RES (16)..(16): Cys-PEG
HXQGTFTSDYSKYLDCRRAKDFVQWLMNT

SEQ ID NO: 355 - protein, 29 aa, Artificial Sequence
  Synthetic peptide
  MISC_FEATURE: c-term amidation
  MOD_RES (2)..(2): D-Ala
  MOD_RES (16)..(16): Cys-PEG
HXQGTFTSDYSKYLDCRAAKDFVQWLMNT

SEQ ID NO: 356 - protein, 29 aa, Artificial Sequence
  Synthetic peptide
  MISC_FEATURE: c-term amidation
  MOD_RES (2)..(2): D-Ala
  MOD_RES (16)..(16): Cys-PEG
HXQGTFTSDYSKYLDCQAAKEFIAWLMNT

SEQ ID NO: 357 - protein, 29 aa, Artificial Sequence
  Synthetic peptide
  MISC_FEATURE: c-term amidation
  MOD_RES (2)..(2): D-Ala
  MOD_RES (16)..(16): Cys-PEG
HXQGTFTSDYSKYLDCQAAKEFIAWLVKG

SEQ ID NO: 358 - protein, 29 aa, Artificial Sequence
  Synthetic peptide
  MISC_FEATURE: c-term amidation
  MOD_RES (16)..(16): Cys-PEG
HSEGTFTSDYSKYLDCRRAKDFVQWLMNT

SEQ ID NO: 359 - protein, 29 aa, Artificial Sequence
  Synthetic peptide
  MISC_FEATURE: c-term amidation
  MOD_RES (16)..(16): Cys-PEG
HSEGTFTSDYSKYLDCRAAKDFVQWLMNT

SEQ ID NO: 360 - protein, 29 aa, Artificial Sequence
  Synthetic peptide
  MISC_FEATURE: c-term amidation
  MOD_RES (16)..(16): Cys-PEG
HSEGTFTSDYSKYLDCQAAKEFIAWLMNT

SEQ ID NO: 361 - protein, 29 aa, Artificial Sequence
  Synthetic peptide
  MISC_FEATURE: c-term amidation
  MOD_RES (16)..(16): Cys-PEG
HSEGTFTSDYSKYLDCQAAKEFIAWLVKG

SEQ ID NO: 362 - protein, 29 aa, Artificial Sequence
  Synthetic peptide
  MISC_FEATURE: c-term amidation
  MOD_RES (1)..(1): (Des-amino)His
  MOD_RES (16)..(16): Cys-PEG
XSEGTFTSDYSKYLDCRRAKDFVQWLMNT

SEQ ID NO: 363 - protein, 29 aa, Artificial Sequence
  Synthetic peptide
  MISC_FEATURE: c-term amidation
  MOD_RES (1)..(1): (Des-amino)His
  MOD_RES (16)..(16): Cys-PEG
XSEGTFTSDYSKYLDCRAAKDFVQWLMNT

SEQ ID NO: 364 - protein, 29 aa, Artificial Sequence
  Synthetic peptide
  MISC_FEATURE: c-term amidation
  MOD_RES (1)..(1): (Des-amino)His
  MOD_RES (16)..(16): Cys-PEG
XSEGTFTSDYSKYLDCQAAKEFIAWLMNT

SEQ ID NO: 365 - protein, 29 aa, Artificial Sequence
  Synthetic peptide
  MISC_FEATURE: c-term amidation
  MOD_RES (1)..(1): (Des-amino)His
  MOD_RES (16)..(16): Cys-PEG
XSEGTFTSDYSKYLDCQAAKEFIAWLVKG

SEQ ID NO: 366 - protein, 29 aa, Artificial Sequence
  Synthetic peptide
  MISC_FEATURE: c-term amidation
  MOD_RES (2)..(2): D-Ala
  MOD_RES (16)..(16): Cys-PEG
HXEGTFTSDYSKYLDCRRAKDFVQWLMNT

SEQ ID NO: 367 - protein, 29 aa, Artificial Sequence
  Synthetic peptide
  MISC_FEATURE: c-term amidation
  MOD_RES (2)..(2): D-Ala
  MOD_RES (16)..(16): Cys-PEG
HXEGTFTSDYSKYLDCRAAKDFVQWLMNT

SEQ ID NO: 368 - protein, 29 aa, Artificial Sequence
  Synthetic peptide
  MISC_FEATURE: c-term amidation
  MOD_RES (2)..(2): D-Ala
  MOD_RES (16)..(16): Cys-PEG
HXEGTFTSDYSKYLDCQAAKEFIAWLMNT

SEQ ID NO: 369 - protein, 29 aa, Artificial Sequence
  Synthetic peptide
  MISC_FEATURE: c-term amidation
  MOD_RES (2)..(2): D-Ala
  MOD_RES (16)..(16): Cys-PEG
HXEGTFTSDYSKYLDCQAAKEFIAWLVKG

SEQ ID NO: 370 - protein, 29 aa, Artificial Sequence
  Synthetic peptide
  MISC_FEATURE: c-term amidation
  MOD_RES (2)..(2): D-Ala
  MOD_RES (16)..(16): Cys-PEG
HXEGTFTSDYSKYLDCRRAKDFVQWLMNT

SEQ ID NO: 371 - protein, 29 aa, Artificial Sequence
  Synthetic peptide
  MISC_FEATURE: c-term amidation
  MOD_RES (2)..(2): D-Ala
  MOD_RES (16)..(16): Cys-PEG
HXEGTFTSDYSKYLDCRAAKDFVQWLMNT

SEQ ID NO: 372 - protein, 29 aa, Artificial Sequence
  Synthetic peptide
  MISC_FEATURE: c-term amidation
  MOD_RES (2)..(2): D-Ala
  MOD_RES (16)..(16): Cys-PEG
HXEGTFTSDYSKYLDCQAAKEFIAWLMNT

SEQ ID NO: 373 - protein, 29 aa, Artificial Sequence
  Synthetic peptide
  MISC_FEATURE: c-term amidation
  MOD_RES (2)..(2): D-Ala
  MOD_RES (16)..(16): Cys-PEG
HXEGTFTSDYSKYLDCQAAKEFIAWLVKG

SEQ ID NO: 374 - protein, 29 aa, Artificial Sequence
  Synthetic peptide
  MISC_FEATURE: c-term amidation
HSQGTFTSDYSKYLDERRAQDFVQWLMDT

SEQ ID NO: 375 - protein, 29 aa, Artificial Sequence
  Synthetic peptide
  MISC_FEATURE: c-term amidation
HSQGTFTSDYSKYLDERRAKDFVQWLMDT

SEQ ID NO: 376 - protein, 29 aa, Artificial Sequence
  Synthetic peptide
  MISC_FEATURE: c-term amidation
  MISC_FEATURE (16)..(20): Lactam ring between side chains at positions 16 and 20
HSQGTFTSDYSKYLDERRAKDFVQWLMDT

SEQ ID NO: 377 - protein, 29 aa, Artificial Sequence
  Synthetic peptide
  MISC_FEATURE: c-term amidation
  MISC_FEATURE (12)..(16): Lactam ring between side chains at positions 12 and 16
HSQGTFTSDYSKYLDERRAQDFVQWLMDT

SEQ ID NO: 378 - protein, 29 aa, Artificial Sequence
  Synthetic peptide
  MISC_FEATURE: c-term amidation
  MISC_FEATURE (12)..(16): Lactam ring between side chains at positions 12 and 16
HSQGTFTSDYSKYLDERRAKDFVQWLMDT

SEQ ID NO: 379 - protein, 29 aa, Artificial Sequence
  Synthetic peptide
  MISC_FEATURE: c-term amidation
  MISC_FEATURE (16)..(20): Lactam ring between side chains at positions 16 and 20
HSQGTFTSDYSKYLDKRRAEDFVQWLMDT

SEQ ID NO: 380 - protein, 29 aa, Artificial Sequence
  Synthetic peptide
  MISC_FEATURE: c-term amidation
HSQGTFTSDYSKYLDERAAKDFVQWLMDT

SEQ ID NO: 381 - protein, 29 aa, Artificial Sequence
  Synthetic peptide
  MISC_FEATURE: c-term amidation; lactam ring between side chains at positions 16 and 20
HSQGTFTSDYSKYLDERAAKDFVQWLMDT

SEQ ID NO: 382 - protein, 29 aa, Artificial Sequence
  Synthetic peptide
  MISC_FEATURE: c-term amidation
  MISC_FEATURE (12)..(16): Lactam ring between side chains at positions 12 and 16
HSQGTFTSDYSKYLDERAAQDFVQWLMDT

SEQ ID NO: 383 - protein, 29 aa, Artificial Sequence
  Synthetic peptide
  MISC_FEATURE: c-term amidation
  MISC_FEATURE (12)..(16): Lactam ring between side chains at positions 12 and 16
HSQGTFTSDYSKYLDERAAKDFVQWLMDT

SEQ ID NO: 384 - protein, 29 aa, Artificial Sequence
  Synthetic peptide
  MISC_FEATURE: c-term amidation
  MISC_FEATURE (16)..(20): Lactam ring between side chains at positions 16 and 20
HSQGTFTSDYSKYLDKRAAEDFVQWLMDT

SEQ ID NO: 385 - protein, 29 aa, Artificial Sequence
  Synthetic peptide
  MISC_FEATURE: c-term amidation
HSQGTFTSDYSKYLDEQAAKEFIAWLMDT

SEQ ID NO: 386 - protein, 29 aa, Artificial Sequence
  Synthetic peptide
  MISC_FEATURE: c-term amidation
  MISC_FEATURE (12)..(16): Lactam ring between side chains at positions 12 and 16
HSQGTFTSDYSKYLDEQAAKEFIAWLMDT

SEQ ID NO: 387 - protein, 29 aa, Artificial Sequence
  Synthetic peptide
  MISC_FEATURE: c-term amidation
  MISC_FEATURE (16)..(20): Lactam ring between side chains at positions 16 and 20
HSQGTFTSDYSKYLDEQAAKEFIAWLMDT

SEQ ID NO: 388 - protein, 29 aa, Artificial Sequence
  Synthetic peptide
  MISC_FEATURE: c-term amidation
  MOD_RES (1)..(1): (Des-amino)His
XSQGTFTSDYSKYLDERRAQDFVQWLMDT

SEQ ID NO: 389 - protein, 29 aa, Artificial Sequence
  Synthetic peptide
  MISC_FEATURE: c-term amidation
  MOD_RES (1)..(1): (Des-amino)His
XSQGTFTSDYSKYLDERRAKDFVQWLMDT

SEQ ID NO: 390 - protein, 29 aa, Artificial Sequence
  Synthetic peptide
  MISC_FEATURE: c-term amidation
  MOD_RES (1)..(1): (Des-amino)His
  MISC_FEATURE (16)..(20): Lactam ring between side chains at positions 16 and 20
XSQGTFTSDYSKYLDERRAKDFVQWLMDT

SEQ ID NO: 391 - protein, 29 aa, Artificial Sequence
  Synthetic peptide
  MISC_FEATURE: c-term amidation
  MOD_RES (1)..(1): (Des-amino)His
  MISC_FEATURE (12)..(16): Lactam ring between side chains at positions 12 and 16
XSQGTFTSDYSKYLDERRAQDFVQWLMDT

SEQ ID NO: 392 - protein, 29 aa, Artificial Sequence
  Synthetic peptide
  misc_feature (1)..(1): Xaa can be any naturally occurring amino acid
XSQGTFTSDYSKYLDERRAKDFVQWLMDT

SEQ ID NO: 393 - protein, 29 aa, Artificial Sequence
  Synthetic peptide
  MISC_FEATURE: c-term amidation
  MOD_RES (1)..(1): (Des-amino)His
  MISC_FEATURE (16)..(20): Lactam ring between side chains at positions 16 and 20
XSQGTFTSDYSKYLDKRRAEDFVQWLMDT

SEQ ID NO: 394 - protein, 29 aa, Artificial Sequence
  Synthetic peptide
  MISC_FEATURE: c-term amidation
  MOD_RES (1)..(1): (Des-amino)His
XSQGTFTSDYSKYLDERAAKDFVQWLMDT

SEQ ID NO: 395 - protein, 29 aa, Artificial Sequence
  Synthetic peptide
  MISC_FEATURE: c-term amidation
  MOD_RES (1)..(1): (Des-amino)His
  MISC_FEATURE (16)..(20): Lactam ring between side chains at positions 16 and 20
XSQGTFTSDYSKYLDERAAKDFVQWLMDT

SEQ ID NO: 396 - protein, 29 aa, Artificial Sequence
  Synthetic peptide
  MISC_FEATURE: c-term amidation
  MOD_RES (1)..(1): (Des-amino)His
  MISC_FEATURE (12)..(16): Lactam ring between side chains at positions 12 and 16
XSQGTFTSDYSKYLDERAAQDFVQWLMDT

SEQ ID NO: 397 - protein, 29 aa, Artificial Sequence
  Synthetic peptide
  MISC_FEATURE: c-term amidation
  MOD_RES (1)..(1): (Des-amino)His
  MISC_FEATURE (12)..(16): Lactam ring between side chains at positions 12 and 16
XSQGTFTSDYSKYLDERAAKDFVQWLMDT

SEQ ID NO: 398 - protein, 29 aa, Artificial Sequence
  Synthetic peptide
  MISC_FEATURE: c-term amidation
  MOD_RES (1)..(1): (Des-amino)His
  MISC_FEATURE (16)..(20): Lactam ring between side chains at positions 16 and 20
XSQGTFTSDYSKYLDKRAAEDFVQWLMDT

SEQ ID NO: 399 - protein, 29 aa, Artificial Sequence
  Synthetic peptide
  MISC_FEATURE: c-term amidation
  MOD_RES (1)..(1): (Des-amino)His
XSQGTFTSDYSKYLDEQAAKEFIAWLMDT

SEQ ID NO: 400 - protein, 29 aa, Artificial Sequence
  Synthetic peptide
  MISC_FEATURE: c-term amidation
  MOD_RES (1)..(1): (Des-amino)His
  MISC_FEATURE (12)..(16): Lactam ring between side chains at positions 12 and 16
XSQGTFTSDYSKYLDEQAAKEFIAWLMDT

SEQ ID NO: 401 - protein, 29 aa, Artificial Sequence
  Synthetic peptide
  MISC_FEATURE: c-term amidation
  MOD_RES (1)..(1): (Des-amino)His
  MISC_FEATURE (16)..(20): Lactam ring between side chains at positions 16 and 20
XSQGTFTSDYSKYLDEQAAKEFIAWLMDT

SEQ ID NO: 402 - protein, 29 aa, Artificial Sequence
  Synthetic peptide
  MISC_FEATURE: c-term amidation
  MOD_RES (2)..(2): Aminoisobutyric acid
HXQGTFTSDYSKYLDERRAQDFVQWLMDT

SEQ ID NO: 403 - protein, 29 aa, Artificial Sequence
  Synthetic peptide
  MISC_FEATURE: c-term amidation
  MOD_RES (2)..(2): Aminoisobutyric acid
HXQGTFTSDYSKYLDERRAKDFVQWLMDT

SEQ ID NO: 404 - protein, 29 aa, Artificial Sequence
  Synthetic peptide
  MISC_FEATURE: c-term amidation
  MOD_RES (2)..(2): Aminoisobutyric acid
  MISC_FEATURE (16)..(20): Lactam ring between side chains at positions 16 and 20
HXQGTFTSDYSKYLDERRAKDFVQWLMDT

SEQ ID NO: 405 - protein, 29 aa, Artificial Sequence
  Synthetic peptide
  MISC_FEATURE: c-term amidation
  MOD_RES (2)..(2): aminoisobutyric acid
  MISC_FEATURE (12)..(16): Lactam ring between side chains at positions 12 and 16
HXQGTFTSDYSKYLDERRAQDFVQWLMDT

SEQ ID NO: 406 - protein, 29 aa, Artificial Sequence
  Synthetic peptide
  MISC_FEATURE: c-term amidation
  MOD_RES (2)..(2): Aminoisobutyric acid
  MISC_FEATURE (12)..(16): Lactam ring between side chains at positions 12 and 16
HXQGTFTSDYSKYLDERRAKDFVQWLMDT

SEQ ID NO: 407 - protein, 29 aa, Artificial Sequence
  Synthetic peptide
  MISC_FEATURE: c-term amidation
  MOD_RES (2)..(2): Aminoisobutyric acid
  MISC_FEATURE (16)..(20): Lactam ring between side chains at positions 16 and 20
HXQGTFTSDYSKYLDKRRAEDFVQWLMDT

SEQ ID NO: 408 - protein, 29 aa, Artificial Sequence
  Synthetic peptide
  MOD_RES (2)..(2): Aminoisobutyric acid
  MISC_FEATURE (2)..(2): c-term amidation
HXQGTFTSDYSKYLDERAAKDFVQWLMDT

SEQ ID NO: 409 - protein, 29 aa, Artificial Sequence
  Synthetic peptide
  MISC_FEATURE: c-term amidation
  MOD_RES (2)..(2): Aminoisobutyric acid
  MISC_FEATURE (16)..(20): Lactam ring between side chains at positions 16 and 20
HXQGTFTSDYSKYLDERAAKDFVQWLMDT

SEQ ID NO: 410 - protein, 29 aa, Artificial Sequence
  Synthetic peptide
  MISC_FEATURE: c-term amidation
  MOD_RES (2)..(2): Aminoisobutyric acid
  MISC_FEATURE (12)..(16): Lactam ring between side chains at positions 12 and 16
HXQGTFTSDYSKYLDERAAQDFVQWLMDT

SEQ ID NO: 411 - protein, 29 aa, Artificial Sequence
  Synthetic peptide
  MISC_FEATURE: c-term amidation
  MOD_RES (2)..(2): Aminoisobutyric acid
  MISC_FEATURE (12)..(16): Lactam ring between side chains at positions 12 and 16
HXQGTFTSDYSKYLDERAAKDFVQWLMDT

SEQ ID NO: 412 - protein, 29 aa, Artificial Sequence
  Synthetic peptide
  MISC_FEATURE: c-term amidation
  MOD_RES (2)..(2): Aminoisobutyric acid
  MISC_FEATURE (12)..(16): Lactam ring between side chains at positions 16 and 20
HXQGTFTSDYSKYLDKRAAEDFVQWLMDT

SEQ ID NO: 413 - protein, 29 aa, Artificial Sequence
  Synthetic peptide
  MISC_FEATURE: c-term amidation
  MOD_RES (2)..(2): Aminoisobutyric acid
HXQGTFTSDYSKYLDEQAAKEFIAWLMDT

SEQ ID NO: 414 - protein, 29 aa, Artificial Sequence
  Synthetic peptide
  MISC_FEATURE: c-term amidation
  MOD_RES (2)..(2): Aminoisobutyric acid
  MISC_FEATURE (12)..(16): Lactam ring between side chains at positions 12 and 16
HXQGTFTSDYSKYLDEQAAKEFIAWLMDT

SEQ ID NO: 415 - protein, 29 aa, Artificial Sequence
  Synthetic peptide
  MISC_FEATURE: c-term amidation
  MOD_RES (2)..(2): Aminoisobutyric acid
  MISC_FEATURE (16)..(20): Lactam ring between side chains at positions 16 and 20
HXQGTFTSDYSKYLDEQAAKEFIAWLMDT

SEQ ID NO: 416 - protein, 29 aa, Artificial Sequence
  Synthetic peptide
  MISC_FEATURE: c-term amidation
  MOD_RES (2)..(2): D-Ala
HXQGTFTSDYSKYLDERRAQDFVQWLMDT

SEQ ID NO: 417 - protein, 29 aa, Artificial Sequence
  Synthetic peptide
  MISC_FEATURE: c-term amidation
  MOD_RES (2)..(2): D-Ala
HXQGTFTSDYSKYLDERRAKDFVQWLMDT

SEQ ID NO: 418 - protein, 29 aa, Artificial Sequence
  Synthetic peptide
  MISC_FEATURE: c-term amidation
  MOD_RES (2)..(2): D-Ala
  MISC_FEATURE (16)..(20): Lactam ring between side chains at positions 16 and 20
HXQGTFTSDYSKYLDERRAKDFVQWLMDT

SEQ ID NO: 419 - protein, 29 aa, Artificial Sequence
  Synthetic peptide
  MISC_FEATURE: c-term amidation
  MOD_RES (2)..(2): D-Ala
  MISC_FEATURE (12)..(16): Lactam ring between side chains at positions 12 and 16
HXQGTFTSDYSKYLDERRAQDFVQWLMDT

SEQ ID NO: 420 - protein, 29 aa, Artificial Sequence
  Synthetic peptide
  MISC_FEATURE: c-term amidation
  MOD_RES (2)..(2): D-Ala
  MISC_FEATURE (12)..(16): Lactam ring between side chains at positions 12 and 16
HXQGTFTSDYSKYLDERRAKDFVQWLMDT

SEQ ID NO: 421 - protein, 29 aa, Artificial Sequence
  Synthetic peptide
  MISC_FEATURE: c-term amidation
  MOD_RES (2)..(2): D-Ala
  MISC_FEATURE (16)..(20): Lactam ring between side chains at positions 16 and 20
HXQGTFTSDYSKYLDKRRAEDFVQWLMDT

SEQ ID NO: 422 - protein, 29 aa, Artificial Sequence
  Synthetic peptide
  MISC_FEATURE: c-term amidation
  MOD_RES (2)..(2): D-Ala
HXQGTFTSDYSKYLDERAAKDFVQWLMDT

SEQ ID NO: 423 - protein, 29 aa, Artificial Sequence
  Synthetic peptide
  MISC_FEATURE: c-term amidation
  MOD_RES (2)..(2): D-Ala
  MISC_FEATURE (16)..(20): Lactam ring between side chains at positions 16 and 20
HXQGTFTSDYSKYLDERAAKDFVQWLMDT

SEQ ID NO: 424 - protein, 29 aa, Artificial Sequence
  Synthetic peptide
  MISC_FEATURE: c-term amidation
  MOD_RES (2)..(2): D-Ala
  MISC_FEATURE (12)..(16): Lactam ring between side chains at positions 12 and 16
HXQGTFTSDYSKYLDERAAQDFVQWLMDT

SEQ ID NO: 425 - protein, 29 aa, Artificial Sequence
  Synthetic peptide
  MISC_FEATURE: c-term amidation
  MOD_RES (2)..(2): D-Ala
  MISC_FEATURE (12)..(16): Lactam ring between side chains at positions 12 and 16
HXQGTFTSDYSKYLDERAAKDFVQWLMDT

SEQ ID NO: 426 - protein, 29 aa, Artificial Sequence
  Synthetic peptide
  MISC_FEATURE: c-term amidation
  MOD_RES (2)..(2): D-Ala
  MISC_FEATURE (16)..(20): Lactam ring between side chains at positions 16 and 20
HXQGTFTSDYSKYLDKRAAEDFVQWLMDT

SEQ ID NO: 427 - protein, 29 aa, Artificial Sequence
  Synthetic peptide
  MISC_FEATURE: c-term amidation
  MOD_RES (2)..(2): D-Ala
HXQGTFTSDYSKYLDEQAAKEFIAWLMDT

SEQ ID NO: 428 - protein, 29 aa, Artificial Sequence
  Synthetic peptide
  MISC_FEATURE: c-term amidation
  MOD_RES (2)..(2): D-Ala
  MISC_FEATURE (12)..(16): Lactam ring between side chains at positions 12 and 16
HXQGTFTSDYSKYLDEQAAKEFIAWLMDT

SEQ ID NO: 429 - protein, 29 aa, Artificial Sequence
  Synthetic peptide
  MISC_FEATURE: c-term amidation
  MOD_RES (2)..(2): D-Ala
  MISC_FEATURE (16)..(20): Lactam ring between side chains at positions 16 and 20
HXQGTFTSDYSKYLDEQAAKEFIAWLMDT

SEQ ID NO: 430 - protein, 29 aa, Artificial Sequence
  Synthetic peptide
  MISC_FEATURE: c-term amidation
HSEGTFTSDYSKYLDERRAQDFVQWLMDT

SEQ ID NO: 431 - protein, 29 aa, Artificial Sequence
  Synthetic peptide
  MISC_FEATURE: c-term amidation
HSEGTFTSDYSKYLDERRAKDFVQWLMDT

SEQ ID NO: 432 - protein, 29 aa, Artificial Sequence
  Synthetic peptide
  MISC_FEATURE: c-term amidation
  MISC_FEATURE (16)..(20): Lactam ring between side chains at positions 16 and 20
HSEGTFTSDYSKYLDERRAKDFVQWLMDT

SEQ ID NO: 433 - protein, 29 aa, Artificial Sequence
  Synthetic peptide
  MISC_FEATURE: c-term amidation
  MISC_FEATURE (16)..(16): Lactam ring between side chains at positions 12 and 16
HSEGTFTSDYSKYLDERRAQDFVQWLMDT

SEQ ID NO: 434 - protein, 29 aa, Artificial Sequence
  Synthetic peptide
  MISC_FEATURE: c-term amidation
  MISC_FEATURE (12)..(16): Lactam ring between side chains at positions 12 and 16
HSEGTFTSDYSKYLDERRAKDFVQWLMDT

SEQ ID NO: 435 - protein, 29 aa, Artificial Sequence
  Synthetic peptide
  MISC_FEATURE: c-term amidation
  MISC_FEATURE (16)..(20): Lactam ring between side chains at positions 16 and 20
HSEGTFTSDYSKYLDKRRAEDFVQWLMDT

SEQ ID NO: 436 - protein, 29 aa, Artificial Sequence
  Synthetic peptide
  MISC_FEATURE: c-term amidation
HSEGTFTSDYSKYLDERAAKDFVQWLMDT

SEQ ID NO: 437 - protein, 29 aa, Artificial Sequence
  Synthetic peptide
  MISC_FEATURE: c-term amidation
  MISC_FEATURE: Lactam ring between side chains at positions 16 and 20
HSEGTFTSDYSKYLDERAAKDFVQWLMDT

SEQ ID NO: 438 - protein, 29 aa, Artificial Sequence
  Synthetic peptide
  MISC_FEATURE: c-term amidation
  MISC_FEATURE (12)..(16): Lactam ring between side chains at positions 12 and 16
HSEGTFTSDYSKYLDERAAQDFVQWLMDT

SEQ ID NO: 439 - protein, 29 aa, Artificial Sequence
  Synthetic peptide
  MISC_FEATURE: c-term amidation
  MISC_FEATURE (12)..(16): Lactam ring between side chains at positions 12 and 16
HSEGTFTSDYSKYLDERAAKDFVQWLMDT

SEQ ID NO: 440 - protein, 29 aa, Artificial Sequence
  Synthetic peptide
  MISC_FEATURE: c-term amidation
  MISC_FEATURE (16)..(20): Lactam ring between side chains at positions 16 and 20
HSEGTFTSDYSKYLDKRAAEDFVQWLMDT

SEQ ID NO: 441 - protein, 29 aa, Artificial Sequence
  Synthetic peptide
  MISC_FEATURE: c-term amidation
HSEGTFTSDYSKYLDEQAAKEFIAWLMDT

SEQ ID NO: 442 - protein, 29 aa, Artificial Sequence
  Synthetic peptide
  MISC_FEATURE: c-term amidation
  MISC_FEATURE (12)..(16): Lactam ring between side chains at positions 12 and 16
HSEGTFTSDYSKYLDEQAAKEFIAWLMDT

SEQ ID NO: 443 - protein, 29 aa, Artificial Sequence
  Synthetic peptide
  MISC_FEATURE: c-term amidation
  MISC_FEATURE (16)..(20): Lactam ring between side chains at positions 16 and 20
HSEGTFTSDYSKYLDEQAAKEFIAWLMDT

SEQ ID NO: 444 - protein, 29 aa, Artificial Sequence
  Synthetic peptide
  MISC_FEATURE: c-term amidation
  MOD_RES (1)..(1): (Des-amino)His
XSEGTFTSDYSKYLDERRAQDFVQWLMDT

SEQ ID NO: 445 - protein, 29 aa, Artificial Sequence
  Synthetic peptide
  MISC_FEATURE: c-term amidation
  MOD_RES (1)..(1): (Des-amino)His
XSEGTFTSDYSKYLDERRAKDFVQWLMDT

SEQ ID NO: 446 - protein, 29 aa, Artificial Sequence
  Synthetic peptide
  MISC_FEATURE: c-term amidation
  MOD_RES (1)..(1): (Des-amino)His
  MISC_FEATURE (16)..(20): Lactam ring between side chains at positions 16 and 20
XSEGTFTSDYSKYLDERRAKDFVQWLMDT

SEQ ID NO: 447 - protein, 29 aa, Artificial Sequence
  Synthetic peptide
  MISC_FEATURE: c-term amidation
  MISC_FEATURE: Lactam ring between side chains at positions 12 and 16
  MOD_RES (1)..(1): (Des-amino)His
XSEGTFTSDYSKYLDERRAQDFVQWLMDT

SEQ ID NO: 448 - protein, 29 aa, Artificial Sequence
  Synthetic peptide
  MISC_FEATURE: c-term amidation
  MOD_RES (1)..(1): (Des-amino)His
  MISC_FEATURE (12)..(16): Lactam ring between side chains at positions 12 and 16
XSEGTFTSDYSKYLDERRAKDFVQWLMDT

SEQ ID NO: 449 - protein, 29 aa, Artificial Sequence
  Synthetic peptide
  MISC_FEATURE: c-term amidation
  MOD_RES (1)..(1): (Des-amino)His
  MISC_FEATURE (16)..(20): Lactam ring between side chains at positions 16 and 20
XSEGTFTSDYSKYLDKRRAEDFVQWLMDT

SEQ ID NO: 450 - protein, 29 aa, Artificial Sequence
  Synthetic peptide
  MISC_FEATURE: c-term amidation
  MOD_RES (1)..(1): (Des-amino)His
XSEGTFTSDYSKYLDERAAKDFVQWLMDT

SEQ ID NO: 451 - protein, 29 aa, Artificial Sequence
  Synthetic peptide
  MISC_FEATURE: c-term amidation
  MOD_RES (1)..(1): (Des-amino)His
  MISC_FEATURE (16)..(20): Lactam ring between side chains at positions 16 and 20
XSEGTFTSDYSKYLDERAAKDFVQWLMDT

SEQ ID NO: 452 - protein, 29 aa, Artificial Sequence
  Synthetic peptide
  MISC_FEATURE: C-term amidation
  MOD_RES (1)..(1): (Des-amino)His
  MISC_FEATURE (12)..(16): Lactam ring between side chains at positions 12 and 16
XSEGTFTSDYSKYLDERAAQDFVQWLMDT

SEQ ID NO: 453 - protein, 29 aa, Artificial Sequence
  Synthetic peptide
  MISC_FEATURE: c-term amidation
  MOD_RES (1)..(1): (Des-amino)His
  MISC_FEATURE (12)..(16): Lactam ring between side chains at positions 12 and 16
XSEGTFTSDYSKYLDERAAKDFVQWLMDT

SEQ ID NO: 454 - protein, 29 aa, Artificial Sequence
  Synthetic peptide
  MISC_FEATURE: c-term amidation
  MOD_RES (1)..(1): (Des-amino)His
  MISC_FEATURE (16)..(20): Lactam ring between side chains at positions 16 and 20
XSEGTFTSDYSKYLDKRAAEDFVQWLMDT

SEQ ID NO: 455 - protein, 29 aa, Artificial Sequence
  Synthetic peptide
  MISC_FEATURE: c-term amidation
  MOD_RES (1)..(1): (Des-amino)His
XSEGTFTSDYSKYLDEQAAKEFIAWLMDT

SEQ ID NO: 456 - protein, 29 aa, Artificial Sequence
  Synthetic peptide
  MISC_FEATURE: c-term amidation
  MOD_RES (1)..(1): (Des-amino)His
  MISC_FEATURE (12)..(16): Lactam ring between side chains at positions 12 and 16
XSEGTFTSDYSKYLDEQAAKEFIAWLMDT

SEQ ID NO: 457 - protein, 29 aa, Artificial Sequence
  Synthetic peptide
  MISC_FEATURE: c-term amidation
  MOD_RES (1)..(1): (Des-amino)His
  MISC_FEATURE (16)..(20): Lactam ring between side chains at positions 16 and 20
XSEGTFTSDYSKYLDEQAAKEFIAWLMDT

SEQ ID NO: 458 - protein, 29 aa, Artificial Sequence
  Synthetic peptide
  MISC_FEATURE: c-term amidation
  MOD_RES (2)..(2): Aminoisobutyric acid
HXEGTFTSDYSKYLDERRAQDFVQWLMDT

SEQ ID NO: 459 - protein, 29 aa, Artificial Sequence
  Synthetic peptide
  MISC_FEATURE: c-term amidation
  MOD_RES (2)..(2): Aminoisobutyric acid
HXEGTFTSDYSKYLDERRAKDFVQWLMDT

SEQ ID NO: 460 - protein, 29 aa, Artificial Sequence
  Synthetic peptide
  MISC_FEATURE: c-term amidation
  MOD_RES (2)..(2): Aminoisobutyric acid
  MISC_FEATURE (16)..(20): Lactam ring between side chains at positions 16 and 20
HXEGTFTSDYSKYLDERRAKDFVQWLMDT

SEQ ID NO: 461 - protein, 29 aa, Artificial Sequence
  Synthetic peptide
  MISC_FEATURE: c-term amidation
  MOD_RES (2)..(2): Aminoisobutyric acid
  MISC_FEATURE (12)..(16): Lactam ring between side chains at positions 12 and 16
HXEGTFTSDYSKYLDERRAQDFVQWLMDT

SEQ ID NO: 462 - protein, 29 aa, Artificial Sequence
  Synthetic peptide
  MISC_FEATURE: c-term amidation
  MOD_RES (2)..(2): Aminoisobutyric acid
  MISC_FEATURE (12)..(16): Lactam ring between side chains at positions 12 and 16
HXEGTFTSDYSKYLDERRAKDFVQWLMDT

SEQ ID NO: 463 - protein, 29 aa, Artificial Sequence
  Synthetic peptide
  MISC_FEATURE: c-term amidation
  MOD_RES (2)..(2): Aminoisobutyric acid
  MISC_FEATURE (16)..(20): Lactam ring between side chains at positions 16 and 20
HXEGTFTSDYSKYLDKRRAEDFVQWLMDT

SEQ ID NO: 464 - protein, 29 aa, Artificial Sequence
  Synthetic peptide
  MISC_FEATURE: c-term amidation
  MOD_RES (2)..(2): Aminoisobutyric acid
HXEGTFTSDYSKYLDERAAKDFVQWLMDT

SEQ ID NO: 465 - protein, 29 aa, Artificial Sequence
  Synthetic peptide
  MISC_FEATURE: c-term amidation
  MOD_RES (2)..(2): Aminoisobutyric acid
  MISC_FEATURE (16)..(20): Lactam ring between side chains at positions 16 and 20
HXEGTFTSDYSKYLDERAAKDFVQWLMDT

SEQ ID NO: 466 - protein, 29 aa, Artificial Sequence
  Synthetic peptide
  MISC_FEATURE: c-term amidation
  MOD_RES (2)..(2): Aminoisobutyric acid
  MISC_FEATURE (12)..(16): Lactam ring between side chains at postions 12 and 16
HXEGTFTSDYSKYLDERAAQDFVQWLMDT

SEQ ID NO: 467 - protein, 29 aa, Artificial Sequence
  Synthetic peptide
  MISC_FEATURE: c-term amidation
  MOD_RES (2)..(2): Aminoisobutyric acid
  MISC_FEATURE (12)..(16): Lactam ring between side chains at positions 12 and 16
HXEGTFTSDYSKYLDERAAKDFVQWLMDT

SEQ ID NO: 468 - protein, 29 aa, Artificial Sequence
  Synthetic peptide
  MISC_FEATURE: c-term amidation
  MOD_RES (2)..(2): Aminoisobutyric acid
  MISC_FEATURE (12)..(16): Lactam ring between side chains at positions 16 and 20
HXEGTFTSDYSKYLDKRAAEDFVQWLMDT

SEQ ID NO: 469 - protein, 29 aa, Artificial Sequence
  Synthetic peptide
  MISC_FEATURE: c-term amidation
  MOD_RES (2)..(2): Aminoisobutyric acid
HXEGTFTSDYSKYLDEQAAKEFIAWLMDT

SEQ ID NO: 470 - protein, 29 aa, Artificial Sequence
  Synthetic peptide
  MISC_FEATURE: c-term amidation
  MOD_RES (2)..(2): Aminoisobutyric acid
  MISC_FEATURE (12)..(16): Lactam ring between side chains at positions 12 and 16
HXEGTFTSDYSKYLDEQAAKEFIAWLMDT

SEQ ID NO: 471 - protein, 29 aa, Artificial Sequence
  Synthetic peptide
  MISC_FEATURE: c-term amidation
  MOD_RES (2)..(2): Aminoisobutyric acid
  MISC_FEATURE (16)..(20): Lactam ring between side chains at positions 16 and 20
HXEGTFTSDYSKYLDEQAAKEFIAWLMDT

SEQ ID NO: 472 - protein, 29 aa, Artificial Sequence
  Synthetic peptide
  MISC_FEATURE: c-term amidation
  MOD_RES (2)..(2): D-Ala
HXEGTFTSDYSKYLDERRAQDFVQWLMDT

SEQ ID NO: 473 - protein, 29 aa, Artificial Sequence
  Synthetic peptide
  MISC_FEATURE: c-term amidation
  MOD_RES (2)..(2): D-Ala
HXEGTFTSDYSKYLDERRAKDFVQWLMDT

SEQ ID NO: 474 - protein, 29 aa, Artificial Sequence
  Synthetic peptide
  MISC_FEATURE: c-term amidation
  MOD_RES (2)..(2): D-Ala
  MISC_FEATURE (16)..(20): Lactam ring between side chains at positions 16 and 20
HXEGTFTSDYSKYLDERRAKDFVQWLMDT

SEQ ID NO: 475 - protein, 29 aa, Artificial Sequence
  Synthetic peptide
  MISC_FEATURE: c-term amidation
  MOD_RES (2)..(2): D-Ala
  MISC_FEATURE (12)..(16): Lactam ring between side chains at positions 12 and 16
HXEGTFTSDYSKYLDERRAQDFVQWLMDT

SEQ ID NO: 476 - protein, 29 aa, Artificial Sequence
  Synthetic peptide
  MISC_FEATURE: c-term amidation
  MOD_RES (2)..(2): D-Ala
  MISC_FEATURE (12)..(16): Lactam ring between side chains at positions 12 and 16
HXEGTFTSDYSKYLDERRAKDFVQWLMDT

SEQ ID NO: 477 - protein, 29 aa, Artificial Sequence
  Synthetic peptide
  MISC_FEATURE: c-term amidation
  MOD_RES (2)..(2): D-Ala
  MISC_FEATURE (16)..(20): Lactam ring between side chains at positions 16 and 20
HXEGTFTSDYSKYLDKRRAEDFVQWLMDT

SEQ ID NO: 478 - protein, 29 aa, Artificial Sequence
  Synthetic peptide
  MISC_FEATURE: c-term amidation
  MOD_RES (2)..(2): D-Ala
HXEGTFTSDYSKYLDERAAKDFVQWLMDT

SEQ ID NO: 479 - protein, 29 aa, Artificial Sequence
  Synthetic peptide
  MISC_FEATURE: c-term amidation
  MOD_RES (2)..(2): D-Ala
  MISC_FEATURE (16)..(20): Lactam ring between side chains at positions 16 and 20
HXEGTFTSDYSKYLDERAAKDFVQWLMDT

SEQ ID NO: 480 - protein, 29 aa, Artificial Sequence
  Synthetic peptide
  MISC_FEATURE: c-term amidation
  MOD_RES (2)..(2): D-Ala
  MISC_FEATURE (12)..(16): Lactam ring between side chains at positions 12 and 16
HXEGTFTSDYSKYLDERAAQDFVQWLMDT

SEQ ID NO: 481 - protein, 29 aa, Artificial Sequence
  Synthetic peptide
  MISC_FEATURE: c-term amidation
  MOD_RES (2)..(2): D-Ala
  MISC_FEATURE (12)..(16): Lactam ring between side chains at positions 12 and 16
HXEGTFTSDYSKYLDERAAKDFVQWLMDT

SEQ ID NO: 482 - protein, 29 aa, Artificial Sequence
  Synthetic peptide
  MISC_FEATURE: c-term amidation
  MOD_RES (2)..(2): D-Ala
  MISC_FEATURE (16)..(20): Lactam ring between side chains at positions 16 and 20
HXEGTFTSDYSKYLDKRAAEDFVQWLMDT

SEQ ID NO: 483 - protein, 29 aa, Artificial Sequence
  Synthetic peptide
  MISC_FEATURE: c-term amidation
  MOD_RES (2)..(2): D-Ala
HXEGTFTSDYSKYLDEQAAKEFIAWLMDT

SEQ ID NO: 484 - protein, 29 aa, Artificial Sequence
  Synthetic peptide
  MISC_FEATURE: c-term amidation
  MOD_RES (2)..(2): D-Ala
  MISC_FEATURE (12)..(16): Lactam ring between side chains at positions 12 and 16
HXEGTFTSDYSKYLDEQAAKEFIAWLMDT

SEQ ID NO: 485 - protein, 29 aa, Artificial Sequence
  Synthetic peptide
  MISC_FEATURE: c-term amidation
  MOD_RES (2)..(2): D-Ala
  MISC_FEATURE (16)..(20): Lactam ring between side chains at positions 16 and 20
HXEGTFTSDYSKYLDEQAAKEFIAWLMDT

SEQ ID NO: 486 - protein, 29 aa, Artificial Sequence
  Synthetic peptide
  MISC_FEATURE: c-term amidation
  MOD_RES (2)..(2): Aminoisobutyric acid
  MOD_RES (24)..(24): Cys-PEG
HXQGTFTSDYSKYLDEQAAKEFICWLMNT

SEQ ID NO: 487 - protein, 29 aa, Artificial Sequence
  Synthetic peptide
  MISC_FEATURE: c-term amidation
  MOD_RES (2)..(2): Aminoisobutyric acid
  MOD_RES (29)..(29): Cys-PEG
HXQGTFTSDYSKYLDEQAAKEFIAWLMNC

SEQ ID NO: 488 - protein, 40 aa, Artificial Sequence
  Synthetic peptide
  MISC_FEATURE: c-term amidation
  MOD_RES (2)..(2): Aminoisobutyric acid
  MOD_RES (40)..(40): Cys-PEG
HXQGTFTSDYSKYLDEQAAKEFIAWLMNGGPSSGAPPPSC

SEQ ID NO: 489 - protein, 40 aa, Artificial Sequence; identical to SEQ ID NO: 488
  Synthetic peptide
  MISC_FEATURE: c-term amidation
  MOD_RES (2)..(2): Aminoisobutyric acid
  MISC_FEATURE (16)..(20): Lactam ring between side chains at positions 16 and 20
  MOD_RES (40)..(40): Cys-PEG

SEQ ID NO: 490 - protein, 39 aa, Artificial Sequence
  Synthetic peptide
  MISC_FEATURE: c-term amidation
  MOD_RES (2)..(2): Aminoisobutyric acid
  MOD_RES (24)..(24): Cys-PEG
HXQGTFTSDYSKYLDEQAAKEFICWLMNGGPSSGAPPPS

SEQ ID NO: 491 - protein, 39 aa, Artificial Sequence; identical to SEQ ID NO: 490
  Synthetic peptide
  MISC_FEATURE: c-term amidation
  MOD_RES (2)..(2): Aminoisobutyric acid
  MISC_FEATURE (16)..(20): Lactam ring between side chains at positions 16 and 20
  MOD_RES (24)..(24): Cys-PEG

SEQ ID NO: 492 - protein, 29 aa, Artificial Sequence
  Synthetic peptide
  MISC_FEATURE: c-term amidation
  MOD_RES (2)..(2): Aminoisobutyric acid
  MOD_RES (24)..(24): Cys-PEG
HXQGTFTSDYSKYLDERAAKDFVCWLMNT

SEQ ID NO: 493 - protein, 29 aa, Artificial Sequence
  Synthetic peptide
  MISC_FEATURE: c-term amidation
  MOD_RES (2)..(2): Aminoisobutyric acid
  MOD_RES (24)..(24): Cys-PEG
HXQGTFTSDYSKYLDERAAKDFVQWLMNC

SEQ ID NO: 494 - protein, 40 aa, Artificial Sequence
  Synthetic peptide
  MISC_FEATURE: c-term amidation
  MOD_RES (2)..(2): Aminoisobutyric acid
  MOD_RES (24)..(24): Cys-PEG
HXQGTFTSDYSKYLDERAAKDFVQWLMNGGPSSGAPPPSC

SEQ ID NO: 495 - protein, 40 aa, Artificial Sequence; identical to SEQ ID NO: 494
  Synthetic peptide
  MISC_FEATURE: c-term amidation
  MOD_RES (2)..(2): Aminoisobutyric acid
  MISC_FEATURE (16)..(20): Lactam ring between side chains at positions 16 and 20
  MOD_RES (40)..(40): Cys-PEG

SEQ ID NO: 496 - protein, 39 aa, Artificial Sequence
  Synthetic peptide
  MISC_FEATURE: c-term amidation
  MOD_RES (2)..(2): Aminoisobutyric acid
  MOD_RES (24)..(24): Cys-PEG
HXQGTFTSDYSKYLDERAAKDFVCWLMNGGPSSGAPPPS

SEQ ID NO: 497 - protein, 39 aa, Artificial Sequence; identical to SEQ ID NO: 496
  Synthetic peptide
  MISC_FEATURE: c-term amidation
  MOD_RES (2)..(2): Aminoisobutyric acid
  MISC_FEATURE (16)..(20): Lactam ring between side chains at positions 16 and 20
  MOD_RES (24)..(24): Cys-PEG

SEQ ID NO: 498 - protein, 30 aa, Artificial Sequence
  Synthetic peptide
  MISC_FEATURE: c-term amidation
  MOD_RES (2)..(2): Aminoisobutyric acid
  MOD_RES (24)..(24): Cys-PEG
HXQGTFTSDYSKYLDERRAKDFVCWLMNTA

SEQ ID NO: 499 - protein, 29 aa, Artificial Sequence
  Synthetic peptide
  MISC_FEATURE: c-term amidation
  MOD_RES (2)..(2): Aminoisobutyric acid
  MOD_RES (24)..(24): Cys-PEG
HXQGTFTSDYSKYLDERRAKDFVQWLMNC

SEQ ID NO: 500 - protein, 40 aa, Artificial Sequence
  Synthetic peptide
  MISC_FEATURE: c-term amidation
  MOD_RES (2)..(2): Aminoisobutyric acid
  MOD_RES (40)..(40): Cys-PEG
HXQGTFTSDYSKYLDERRAKDFVQWLMNGGPSSGAPPPSC

SEQ ID NO: 501 - protein, 40 aa, Artificial Sequence; identical to SEQ ID NO: 500
  Synthetic peptide
  MISC_FEATURE: c-term amidation
  MOD_RES (2)..(2): Aminoisobutyric acid
  MISC_FEATURE (16)..(20): Lactam ring between side chains at positions 16 and 20
  MOD_RES (40)..(40): Cys-PEG

SEQ ID NO: 502 - protein, 39 aa, Artificial Sequence
  Synthetic peptide
  MISC_FEATURE: c-term amidation
  MOD_RES (2)..(2): Aminoisobutyric acid
  MOD_RES (24)..(24): Cys-PEG
HXQGTFTSDYSKYLDERRAKDFVCWLMNGGPSSGAPPPS

SEQ ID NO: 503 - protein, 39 aa, Artificial Sequence; identical to SEQ ID NO: 502
  Synthetic peptide
  MISC_FEATURE: c-term amidation
  MOD_RES (2)..(2): Aminoisobutyric acid
  MISC_FEATURE (16)..(20): Lactam ring between side chains at positions 16 and 20
  MOD_RES (24)..(24): Cys-PEG

SEQ ID NO: 504 - protein, 29 aa, Artificial Sequence
  Synthetic peptide
  MISC_FEATURE: c-term amidation
  MOD_RES (2)..(2): Aminoisobutyric acid
  MISC_FEATURE (16)..(20): Lactam ring between side chains at positions 16 and 20
  MOD_RES (24)..(24): Cys-PEG
HXQGTFTSDYSKYLDEQAAKEFICWLMNT

SEQ ID NO: 505 - protein, 29 aa, Artificial Sequence
  Synthetic peptide
  MISC_FEATURE: c-term amidation
  MOD_RES (1)..(1): Alpha, Alpha-Dimethyl Imidiazole Acetic Acid
  MISC_FEATURE (16)..(20): Lactam ring between side chains at positions 16 and 20
  MOD_RES (24)..(24): Cys-PEG
XSQGTFTSDYSKYLDEQAAKEFICWLMNT

SEQ ID NO: 506 - protein, 29 aa, Artificial Sequence
  Synthetic peptide
  MISC_FEATURE: c-term amidation
  MOD_RES (1)..(1): Alpha, Alpha-Dimethly Imidiazole Acetic Acid
  MOD_RES (1)..(1): Alpha, Alpha-Dimethly Imidiazole Acetic Acid
  MISC_FEATURE (16)..(20): Lactam ring between side chains at positions 16 and 20
  MOD_RES (29)..(29): Cys-PEG
XSQGTFTSDYSKYLDEQAAKEFIAWLMNC

SEQ ID NO: 507 - protein, 40 aa, Artificial Sequence
  Synthetic peptide
  MISC_FEATURE: c-term amidation
  MOD_RES (1)..(1): Alpha, Alpha Dimethyl Imidiazole Acetic Acid
  MISC_FEATURE (16)..(20): Lactam ring between side chains at positions 16 and 20
  MOD_RES (40)..(40): Cys-PEG
XSQGTFTSDYSKYLDEQAAKEFIAWLMNGGPSSGAPPPSC

SEQ ID NO: 508 - protein, 40 aa, Artificial Sequence
  Synthetic peptide
  MISC_FEATURE: c-term amidation
  MOD_RES (1)..(1): Alpha, Alpha Dimethyl Imidiazole Acetic Acid
  MISC_FEATURE (16)..(20): Lactam ring between side chains at positions 16 and 20
  MOD_RES (40)..(40): Cys-PEG
XSQGTFTSDYSKYLDERRAKDFVQWLMNGGPSSGAPPPSC

SEQ ID NO: 509 - protein, 39 aa, Artificial Sequence
  Synthetic peptide
  MISC_FEATURE: c-term amidation
  MOD_RES (1)..(1): Alpha, Alpha Dimethyl Imidiazole Acetic Acid
  MISC_FEATURE (16)..(20): Lactam ring between side chains at positions 16 and 20
  MOD_RES (24)..(24): Cys-PEG
XSQGTFTSDYSKYLDEQAAKEFICWLMNGGPSSGAPPPS

SEQ ID NO: 510 - protein, 29 aa, Artificial Sequence
  Synthetic peptide
  MISC_FEATURE: c-term amidation
  MOD_RES (1)..(1): Alpha, Alpha Dimethyl Imidiazole Acetic Acid
  misc_feature (2)..(2): Xaa can be any naturally occurring amino acid
  MISC_FEATURE (16)..(20): Lactam ring between side chains at positions 16 and 20
  MOD_RES (24)..(24): Cys-PEG
HXQGTFTSDYSKYLDERRAKDFVCWLMNT

SEQ ID NO: 511 - protein, 29 aa, Artificial Sequence
  Synthetic peptide
  MISC_FEATURE: c-term amidation
  MOD_RES (2)..(2): Alpha, Alpha Dimethyl Imidiazole Acetic Acid
  MISC_FEATURE (16)..(20): Lactam ring between side chains at positions 16 and 20
  MOD_RES (24)..(24): Cys-PEG
HXQGTFTSDYSKYLDERRAKDFVCWLMNT

SEQ ID NO: 512 - protein, 29 aa, Artificial Sequence
  Synthetic peptide
  MISC_FEATURE: c-term amidation
  MOD_RES (1)..(1): Alpha, Alpha Dimethyl Imidiazole Acetic Acid
  MISC_FEATURE (16)..(20): Lactam ring between side chains at positions 16 and 20
  MOD_RES (29)..(29): Cys-PEG
XSQGTFTSDYSKYLDERRAKDFVQWLMNC

SEQ ID NO: 513 - protein, 39 aa, Artificial Sequence
  Synthetic peptide
  MISC_FEATURE: c-term amidation
  MOD_RES (1)..(1): Alpha, Alpha Dimethyl Imidiazole Acetic Acid
  MISC_FEATURE (16)..(20): Lactam ring between side chains at positions 16 and 20
  MOD_RES (24)..(24): Cys-PEG
XSQGTFTSDYSKYLDERRAKDFVCWLMNGGPSSGAPPPS

SEQ ID NO: 514 - protein, 29 aa, Artificial Sequence
  Synthetic peptide
  MISC_FEATURE: c-term amidation
  MISC_FEATURE (16)..(20): Lactam ring between side chains at positions 16 and 20
  MOD_RES (24)..(24): Cys-PEG
HSQGTFTSDYSKYLDEQAAKEFICWLMNT

SEQ ID NO: 515 - protein, 11 aa, Artificial Sequence
  Synthetic peptide
GGPSSGAPPPS

SEQ ID NO: 516 - protein, 12 aa, Artificial Sequence
  Synthetic peptide
  MOD_RES (12)..(12): Cys-PEG
GGPSSGAPPPSC

SEQ ID NO: 517 - protein, 29 aa, Artificial Sequence
  Synthetic peptide
  MISC_FEATURE: c-term amidation
  MOD_RES (2)..(2): Aminoisobutyric acid
  MISC_FEATURE (16)..(20): Lactam ring between side chains at positions 16 and 20
  MOD_RES (24)..(24): Cys-PEG
HXQGTFTSDYSKYLDERRAKDFVCWLMNT

SEQ ID NO: 518 - protein, 29 aa, Artificial Sequence
  Synthetic peptide
  MISC_FEATURE: c-term amidation
  MOD_RES (24)..(24): Cys-PEG
HSQGTFTSDYSKYLDEQAAKEFICWLMNT

SEQ ID NO: 519 - protein, 29 aa, Artificial Sequence
  Synthetic peptide
  MISC_FEATURE: c-term amidation
  MOD_RES (1)..(1): Alpha, Alpha Dimethly Imidiazole Acetic Acid
  MOD_RES (24)..(24): Cys-PEG
XSQGTFTSDYSKYLDEQAAKEFICWLMNT

SEQ ID NO: 520 - protein, 29 aa, Artificial Sequence
  Synthetic peptide
  MISC_FEATURE: c-term amidation
  MOD_RES (1)..(1): Alpha, Alpha Dimethyl Imidiazole Acetic Acid
  MOD_RES (29)..(29): Cys-PEG
XSQGTFTSDYSKYLDEQAAKEFIAWLMNC

SEQ ID NO: 521 - protein, 39 aa, Artificial Sequence; identical to SEQ ID NO: 36
  Synthetic peptide
  MISC_FEATURE: c-term amidation

SEQ ID NO: 522 - protein, 39 aa, Artificial Sequence
  Synthetic peptide
  MISC_FEATURE: c-term amidation
HSQGTFTSDYSKYLDSRRAQDFVQWLMNGGPSSGAPPPS

SEQ ID NO: 523 - protein, 39 aa, Artificial Sequence
  Synthetic peptide
  MISC_FEATURE: c-term amidation
HSQGTFTSDYSKYLDSRRAQDFVQWLMKGGPSSGAPPPS

SEQ ID NO: 524 - protein, 39 aa, Artificial Sequence
  Synthetic peptide
  MISC_FEATURE: c-term amidation
HSQGTFTSDYSKYLDSRRAQDFVQWLVKGGPSSGAPPPS

SEQ ID NO: 525 - protein, 39 aa, Artificial Sequence
  Synthetic peptide
  MISC_FEATURE: c-term amidation
HSQGTFTSDYSKYLDSRRAQDFVQWLMDGGPSSGAPPPS

SEQ ID NO: 526 - protein, 39 aa, Artificial Sequence
  Synthetic peptide
  MISC_FEATURE: c-term amidation
HSQGTFTSDYSKYLDERRAKDFVQWLMDGGPSSGAPPPS

SEQ ID NO: 527 - protein, 30 aa, Artificial Sequence
  Synthetic peptide
  MISC_FEATURE: c-term amidation
HAEGTFTSDVSSYLEGQAAKEFIAWLVKGG

SEQ ID NO: 528 - protein, 29 aa, Artificial Sequence
  Synthetic peptide
  MISC_FEATURE: c-term amidation
  MOD_RES (2)..(2): Aminoisobutyric acid
  MISC_FEATURE (16)..(20): Lactam ring between side chains at positions 16 and 20
  MOD_RES (24)..(24): Cys-PEG
HXQGTFTSDYSKYLDERRAKDFVCWLMNT

SEQ ID NO: 529 - protein, 39 aa, Artificial Sequence; identical to SEQ ID NO: 513
  Synthetic peptide
  MISC_FEATURE: c-term amidation
  MOD_RES (1)..(1): Alpha, Alpha Dimethyl Imidiazole Acetic Acid
  MOD_RES (24)..(24): Cys-PEG

SEQ ID NO: 530 - protein, 29 aa, Artificial Sequence
  Synthetic peptide
  MISC_FEATURE: c-term amidation
  MOD_RES (1)..(1): Alpha, Alpha Dimethyl Imidiazole Acetic Acid
  MOD_RES (24)..(24): Cys-PEG
XSQGTFTSDYSKYLDERRAKDFVCWLMNT

SEQ ID NO: 531 - protein, 40 aa, Artificial Sequence
  Synthetic peptide
  MISC_FEATURE: c-term amidation
  MOD_RES (2)..(2): Aminoisobutyric acid
  MOD_RES (24)..(24): Cys-PEG
  MOD_RES (40)..(40): Cys-PEG
HXQGTFTSDYSKYLDERRAKEFICWLMNGGPSSGAPPPSC

SEQ ID NO: 532 - protein, 41 aa, Artificial Sequence
  Synthetic peptide
  MISC_FEATURE: c-term amidation
  MOD_RES (2)..(2): Aminoisobutyric acid
  MOD_RES (40)..(40): Cys-PEG
  MOD_RES (41)..(41): Cys-PEG
HXQGTFTSDYSKYLDEQAAKEFIAWLMNGGPSSGAPPPSCC

SEQ ID NO: 533 - protein, 39 aa, Artificial Sequence; identical to SEQ ID NO: 490
  Synthetic peptide
  MOD_RES (2)..(2): Aminoisobutyric acid
  MOD_RES (24)..(24): Cys-PEG
  MISC_FEATURE (24)..(24): c-term amidation

SEQ ID NO: 534 - protein, 29 aa, Artificial Sequence
  Synthetic peptide
  MISC_FEATURE: Chimera 2 AIB2 K10-C8 Cys 24-40K
  MISC_FEATURE: c-term amidation
  MOD_RES (2)..(2): Aminoisobutyric acid
  MOD_RES (10)..(10): Acylated with C8 fatty acid
  MOD_RES (24)..(24): Cys-PEG
HXQGTFTSDKSKYLDEQAAKEFICWLMNT

SEQ ID NO: 535 - protein, 29 aa, Artificial Sequence
  Synthetic peptide
  MISC_FEATURE: Chimera 2 AIB2 K10-C14 Cys 24-40K
  MISC_FEATURE: c-term amidation
  MOD_RES (2)..(2): Aminoisobutyric acid
  MOD_RES (10)..(10): Acylated with C14 fatty acid
  MOD_RES (24)..(24): Cys-PEG
HXQGTFTSDKSKYLDEQAAKEFICWLMNT

SEQ ID NO: 536 - protein, 29 aa, Artificial Sequence
  Synthetic peptide
  MISC_FEATURE: Chimera 2 AIB2 K10-C16 Cys24-40K
  MISC_FEATURE: c-term amidation
  MOD_RES (2)..(2): Aminoisobutyric acid
  MOD_RES (10)..(10): Acylated with C16 fatty acid
  MOD_RES (24)..(24): Cys-PEG
HXQGTFTSDKSKYLDEQAAKEFICWLMNT

SEQ ID NO: 537 - protein, 29 aa, Artificial Sequence
  Synthetic peptide
  MISC_FEATURE: Chimera 2 AIB2 K10-C18 Cys24-40K
  MISC_FEATURE: c-term amidation
  MOD_RES (2)..(2): Aminoisobutyric acid
  MOD_RES (10)..(10): Acylated with C18 fatty acid
  MOD_RES (24)..(24): Cys-PEG
HXQGTFTSDKSKYLDEQAAKEFICWLMNT

SEQ ID NO: 538 - protein, 29 aa, Artificial Sequence
  Synthetic peptide
  MISC_FEATURE: Chimera 2 K10-C18 Cys24-40K
  MISC_FEATURE: c-term amidation
  MOD_RES (10)..(10): Acylated with C18 fatty acid
  MOD_RES (24)..(24): Cys-PEG
HSQGTFTSDKSKYLDEQAAKEFICWLMNT

SEQ ID NO: 539 - protein, 29 aa, Artificial Sequence
  Synthetic peptide
  MISC_FEATURE: Glucagon E16 K20 K10-C18 Cys24-40K
  MOD_RES (10)..(10): Acylated with C18 fatty acid
  MOD_RES (24)..(24): Cys-PEG
HSQGTFTSDKSKYLDERRAKDFVCWLMNT

SEQ ID NO: 540 - protein, 29 aa, Artificial Sequence
  Synthetic peptide
  MISC_FEATURE: Glucagon E16 K20 K10-W-C18
  MISC_FEATURE: c-term amidation
  MOD_RES (10)..(10): Covalently bound to Trp residue comprising a C18 fatty acid
HSQGTFTSDKSKYLDERRAKDFVQWLMNT

SEQ ID NO: 541 - protein, 29 aa, Artificial Sequence
  Synthetic peptide
  MISC_FEATURE: Glucagon E16 K20 K10-W-C16 Cys24-40K
  MOD_RES (10)..(10): Covalently bound to Trp residue comprising a C16 fatty acid
  MOD_RES (24)..(24): Cys-PEG
HSQGTFTSDKSKYLDERRAKDFVCWLMNT

SEQ ID NO: 542 - protein, 29 aa, Artificial Sequence
  Synthetic peptide
  MISC_FEATURE: Glucagon E16 K20 K10-C16
  MISC_FEATURE: c-term amidation
  MOD_RES (10)..(10): Covalently bound to C16 fatty acid
HSQGTFTSDKSKYLDERRAKDFVQWLMNT

SEQ ID NO: 543 - protein, 29 aa, Artificial Sequence
  Synthetic peptide
  MISC_FEATURE: Glucagon E16 K20 K10-C16
  MISC_FEATURE: c-term amidation
  MOD_RES (10)..(10): Covalently bound to Trp residue comprising a C16 fatty acid
HSQGTFTSDKSKYLDERRAKDFVQWLMNT

SEQ ID NO: 544 - protein, 29 aa, Artificial Sequence
  Synthetic peptide
  MISC_FEATURE: Glucagon E16 K20 K10-C18
  MISC_FEATURE: c-term amidation
  MOD_RES (10)..(10): Covalently bound to C18 fatty acid
HSQGTFTSDKSKYLDERRAKDFVQWLMNT

SEQ ID NO: 545 - protein, 29 aa, Artificial Sequence
  Synthetic peptide
  MISC_FEATURE: Glucagon E16 K20
  MISC_FEATURE: c-term amidation
HSQGTFTSDYSKYLDERRAKDFVQWLMNT

SEQ ID NO: 546 - protein, 29 aa, Artificial Sequence
  Synthetic peptide
  MISC_FEATURE: Glucagon E16 K20 K10-W-C16 Cys 24-40K
  MISC_FEATURE: c-term amidation
  MOD_RES (10)..(10): Covalently bound to Trp residue comprising C16 fatty acid
  MOD_RES (24)..(24): Cys-PEG
HSQGTFTSDKSKYLDERRAKDFVCWLMNT

SEQ ID NO: 547 - protein, 29 aa, Artificial Sequence
  Synthetic peptide
  MISC_FEATURE: Glucagon E16 K20 K10-C18 Cys24-40K
  MISC_FEATURE: c-term amidation
  MOD_RES (10)..(10): Covalently bound to C18 fatty acid
  MOD_RES (24)..(24): Cys-PEG
HSQGTFTSDKSKYLDERRAKDFVCWLMNT

SEQ ID NO: 548 - protein, 29 aa, Artificial Sequence
  Synthetic peptide
  MISC_FEATURE: Glucagon E16 K20 K10-C18 Cys24-40K
  MISC_FEATURE: c-term amidation
  MOD_RES (10)..(10): Covalently bound to Trp residue comprising a C18 fatty acid
  MOD_RES (24)..(24): Cys-PEG
HSQGTFTSDKSKYLDERRAKDFVCWLMNT

SEQ ID NO: 549 - protein, 29 aa, Artificial Sequence
  Synthetic peptide
  MISC_FEATURE: Glucagon E16 K20 K10-C16 amide
  MISC_FEATURE: c-term amidation
  MOD_RES (10)..(10): Covalently bound to Glu residue comprising a C16 fatty acid
  MOD_RES (24)..(24): Cys-PEG
HSQGTFTSDKSKYLDERRAQDFVCWLMNT

SEQ ID NO: 550 - protein, 28 aa, Artificial Sequence
  Synthetic peptide
  MISC_FEATURE: Chimera 2 truncated by one amino acid
HSQGTFTSDYSKYLDEQAAKEFIAWLMN

SEQ ID NO: 551 - protein, 27 aa, Artificial Sequence
  Synthetic peptide
  MISC_FEATURE: Chimera 2 truncated by two amino acids
HSQGTFTSDYSKYLDEQAAKEFIAWLM

SEQ ID NO: 552 - protein, 28 aa, Artificial Sequence
  Synthetic peptide
  MISC_FEATURE: aa 1-28, E16 K20 C-terminal amide
  MISC_FEATURE: c-term amidation
HSQGTFTSDYSKYLDERRAKDFVQWLMN

SEQ ID NO: 553 - protein, 27 aa, Artificial Sequence
  Synthetic peptide
  MISC_FEATURE: aa 1-27 E16 K20 C-terminal amide
  MISC_FEATURE: c-term amidation
HSQGTFTSDYSKYLDERRAKDFVQWKM

SEQ ID NO: 554 - protein, 29 aa, Artificial Sequence
  Synthetic peptide
  MISC_FEATURE: c-term amidation
  MOD_RES (27)..(27): Norleucine
HSEGTFTSDYSKYLDEQAAKEFIAWLXNT

SEQ ID NO: 555 - protein, 39 aa, Artificial Sequence
  Synthetic peptide
  MISC_FEATURE (16)..(20): Lactam bridging side chains at positions 16 and 20
YSQGTFTSDYSKYLDEQAAKEFVNWLMNGGPSSGAPPPS

SEQ ID NO: 556 - protein, 29 aa, Artificial Sequence
  Synthetic peptide
  MISC_FEATURE: Chimera 2 with AIB at 16
  MISC_FEATURE: c-term amidation
  MOD_RES (16)..(16): Aminoisobutyric acid
HSQGTFTSDYSKYLDXQAAKEFIAWLMNT

SEQ ID NO: 557 - protein, 29 aa, Artificial Sequence
  Synthetic peptide
  MISC_FEATURE: c-term amidation
  MOD_RES (2)..(2): Aminoisobutyric acid
  MOD_RES (16)..(16): Aminoisobutyric acid
HXQGTFTSDYSKYLDXRRAQDFVQWLMNT

SEQ ID NO: 558 - protein, 29 aa, Artificial Sequence
  Synthetic peptide
  MISC_FEATURE: c-term amidation
  MOD_RES (2)..(2): Aminoisobutyric acid
  MISC_FEATURE (10)..(10): Covalently bound to Trp residue comprising a C16 fatty acid
  MOD_RES (16)..(16): Aminoisobutyric acid
  MOD_RES (24)..(24): Cys-PEG
HXQGTFTSDKSKYLDXRRAQDFVCWLMNT

SEQ ID NO: 559 - protein, 29 aa, Artificial Sequence
  Synthetic peptide
  MISC_FEATURE: c-term amidation
  MOD_RES (2)..(2): Aminoisobutric Acid
  MISC_FEATURE (10)..(10): Covalently bound to Trp residue comprising a C16 fatty acid
  MOD_RES (16)..(16): Aminoisobutric Acid
HXQGTFTSDKSKYLDXRRAQDFVCWLMNT

SEQ ID NO: 560 - protein, 29 aa, Artificial Sequence
  Synthetic peptide
  MISC_FEATURE: c-term amidation
  MOD_RES (2)..(2): Aminoisobutyric acid
  MISC_FEATURE (10)..(10): Covalently bound to Trp residue comprising a C16 fatty acid
  MOD_RES (16)..(16): Aminoisobutyric acid
  MOD_RES (20)..(20): Aminoisobutyric acid
  MOD_RES (24)..(24): Cys-PEG
HXQGTFTSDKSKYLDXRRAXDFVCWLMNT

SEQ ID NO: 561 - protein, 29 aa, Artificial Sequence
  Synthetic peptide
  MISC_FEATURE: c-term amidation
  MOD_RES (2)..(2): Aminoisobutyric acid
  MISC_FEATURE (10)..(10): Covalently bound to Trp residue comprising a C16 fatty acid
  MOD_RES (16)..(16): Aminoisobutyric acid
  MOD_RES (20)..(20): Aminoisobutyric acid
HXQGTFTSDKSKYLDXRRAXDFVCWLMNT

SEQ ID NO: 562 - protein, 29 aa, Artificial Sequence
  Synthetic peptide
  MISC_FEATURE: c-term amidation
  MOD_RES (2)..(2): Aminoisobutyric acid
  MOD_RES (16)..(16): Aminoisobutyric acid
HXQGTFTSDKSKYLDXRRAQDFVQWLMNT

SEQ ID NO: 563 - protein, 29 aa, Artificial Sequence
  Synthetic peptide
  MISC_FEATURE: c-term amidation
  MOD_RES (2)..(2): Aminoisobutyric Acid
  MOD_RES (10)..(10): Acylated with a C16 fatty acyl group
  MOD_RES (16)..(16): Aminoisobutyric Acid
HXQGTFTSDKSKYLDXRRAQDFVQWLMNT

SEQ ID NO: 564 - protein, 29 aa, Artificial Sequence
  Synthetic peptide
  MISC_FEATURE: c-term amidation
  MOD_RES (2)..(2): Aminoisobutyric Acid
  MOD_RES (10)..(10): Acylated with a C16 fatty acyl group via Ala-Ala spacer
  MOD_RES (16)..(16): Aminoisobutyric Acid
HXQGTFTSDKSKYLDXRRAQDFVQWLMNT

SEQ ID NO: 565 - protein, 29 aa, Artificial Sequence
  Synthetic peptide
  MISC_FEATURE: c-term amidation
  MOD_RES (2)..(2): Aminoisobutryic Acid
  MOD_RES (10)..(10): Acylated with a C16 fatty acyl group via gamma-Glu-gamma-Glu spacer
  MOD_RES (16)..(16): Aminoisobutryic Acid
HXQGTFTSDKSKYLDXRRAQDFVQWLMNT

SEQ ID NO: 566 - protein, 29 aa, Artificial Sequence
  Synthetic peptide
  MISC_FEATURE: c-term amidation
  MOD_RES (2)..(2): Aminoisobutryic Acid
  MOD_RES (10)..(10): Acylated with a C16 fatty acyl group via beta-Ala-beta-Ala spacer
  MOD_RES (16)..(16): Aminoisobutryic Acid
HXQGTFTSDKSKYLDXRRAQDFVQWLMNT

SEQ ID NO: 567 - protein, 29 aa, Artificial Sequence
  Synthetic peptide
  MISC_FEATURE: c-term amidation
  MOD_RES (2)..(2): Aminoisobutryic Acid
  MOD_RES (10)..(10): Acylated with a C16 fatty acyl group via 6-aminohexanoic acid spacer
  MOD_RES (16)..(16): Aminoisobutryic Acid
HXQGTFTSDKSKYLDXRRAQDFVQWLMNT

SEQ ID NO: 568 - protein, 29 aa, Artificial Sequence
  Synthetic peptide
  MISC_FEATURE: c-term amidation
  MOD_RES (2)..(2): Aminoisobutryic Acid
  MOD_RES (10)..(10): Acylated with a C16 fatty acyl group via Leu-Leu spacer
  MOD_RES (16)..(16): Aminoisobutryic Acid
HXQGTFTSDKSKYLDXRRAQDFVQWLMNT

SEQ ID NO: 569 - protein, 29 aa, Artificial Sequence
  Synthetic peptide
  MISC_FEATURE: c-term amidation
  MOD_RES (2)..(2): Aminoisobutryic Acid
  MOD_RES (10)..(10): Acylated with a C16 fatty acyl group via Pro-Pro spacer
  MOD_RES (16)..(16): Aminoisobutryic Acid
HXQGTFTSDKSKYLDXRRAQDFVQWLMNT

SEQ ID NO: 570 - protein, 29 aa, Artificial Sequence
  Synthetic peptide
  MISC_FEATURE: c-term amidation
  MOD_RES (2)..(2): Aminoisobutyric Acid
  MOD_RES (10)..(10): Acylated with a C14 fatty acyl group
  MOD_RES (16)..(16): Aminoisobutyric Acid
  MOD_RES (24)..(24): Pegylated
HXQGTFTSDKSKYLDXRRAQDFVCWLMNT

SEQ ID NO: 571 - protein, 29 aa, Artificial Sequence
  Synthetic peptide
  MISC_FEATURE: c-term amidation
  MOD_RES (2)..(2): Aminoisobutyric Acid
  MOD_RES (10)..(10): Acylated with a C14 fatty acyl group via gamma-Glu-gamma-Glu spacer
  MOD_RES (16)..(16): Aminoisobutyric Acid
  MOD_RES (24)..(24): Pegylated
HXQGTFTSDKSKYLDXRRAQDFVCWLMNT

SEQ ID NO: 572 - protein, 29 aa, Artificial Sequence
  Synthetic peptide
  MISC_FEATURE: c-term amidation
  MOD_RES (2)..(2): Aminoisobutryic Acid
  MOD_RES (10)..(10): Acylated with a C14 fatty acyl group via gamma-Glu-gamma-Glu spacer
  MOD_RES (16)..(16): Aminoisobutryic Acid
HXQGTFTSDKSKYLDXRRAQDFVQWLMNT

SEQ ID NO: 573 - protein, 29 aa, Artificial Sequence
  Synthetic peptide
  MISC_FEATURE: c-term amidation
  MOD_RES (2)..(2): Aminoisobutryic Acid
  MOD_RES (10)..(10): Acylated with a C14 fatty acyl group via Ala-Ala spacer
  MOD_RES (16)..(16): Aminoisobutryic Acid
  MOD_RES (24)..(24): Pegylated
HXQGTFTSDKSKYLDXRRAQDFVCWLMNT

SEQ ID NO: 574 - protein, 29 aa, Artificial Sequence
  Synthetic peptide
  MISC_FEATURE: c-term amidation
  MOD_RES (2)..(2): Aminoisobutryic Acid
  MOD_RES (10)..(10): Acylated with a C14 fatty acyl group via Ala-Ala spacer
  MOD_RES (16)..(16): Aminoisobutryic Acid
HXQGTFTSDKSKYLDXRRAQDFVQWLMNT

SEQ ID NO: 575 - protein, 29 aa, Artificial Sequence
  Synthetic peptide
  MISC_FEATURE: c-term amidation
  MOD_RES (2)..(2): Aminoisobutryic acid
  MOD_RES (10)..(10): Acylated with a C16 fatty acyl group via Ala-Ala spacer
  MOD_RES (16)..(16): Aminoisobutryic acid
  MOD_RES (24)..(24): Pegylated
HXQGTFTSDKSKYLDXRRAQDFVCWLMNT

SEQ ID NO: 576 - protein, 29 aa, Artificial Sequence
  Synthetic peptide
  MISC_FEATURE: c-term amidation
  MOD_RES (2)..(2): Aminoisobutryic Acid
  MOD_RES (10)..(10): Acylated with a C16 fatty acyl group via gamma-Glu-gamma-Glu spacer
  MOD_RES (16)..(16): Aminoisobutryic Acid
  MOD_RES (24)..(24): Pegylated
HXQGTFTSDKSKYLDXRRAQDFVCWLMNT

SEQ ID NO: 577 - protein, 29 aa, Artificial Sequence
  Synthetic peptide
  MISC_FEATURE: c-term amidation
  MOD_RES (10)..(10): Acylated with a C16 fatty acyl group
HSQGTFTSDKSKYLDSRRAQDFVQWLMNT

SEQ ID NO: 578 - protein, 29 aa, Artificial Sequence
  Synthetic peptide
  MISC_FEATURE: c-term amidation
  MOD_RES (10)..(10): Acylated with a C16 fatty acyl group via gamma-Glu-gamma-Glu spacer
HSQGTFTSDKSKYLDSRRAQDFVQWLMNT

SEQ ID NO: 579 - protein, 29 aa, Artificial Sequence
  Synthetic peptide
  MISC_FEATURE: AA-C16 Glucagon Amide
  MISC_FEATURE: c-term amidation
  MOD_RES (10)..(10): Acylated with a C16 fatty acyl group via Ala-Ala spacer
HSQGTFTSDKSKYLDSRRAQDFVQWLMNT

SEQ ID NO: 580 - protein, 29 aa, Artificial Sequence
  Synthetic peptide
  MISC_FEATURE: Chimera 2, AIB2, Lys10, Cys24-PEG
  MISC_FEATURE: c-term amidation
  MOD_RES (2)..(2): Aminoisobutryic Acid
  MOD_RES (24)..(24): Pegylated
HXQGTFTSDKSKYLDEQAAKEFICWLMNT

SEQ ID NO: 581 - protein, 30 aa, Artificial Sequence
  Synthetic peptide
  MISC_FEATURE: Peptide dS2E16K20K30-C14 Gluc Amide
  MISC_FEATURE: c-term amidation
  MOD_RES (2)..(2): Xaa is d-Ser
  MOD_RES (30)..(30): Acylated with a C14 fatty acyl group
HXQGTFTSDYSKYLDERRAKDFVQWLMNTK

SEQ ID NO: 582 - protein, 29 aa, Artificial Sequence
  Synthetic peptide
  MISC_FEATURE: Peptide dS2K10(C14)E16K20-Gluc Amide
  MISC_FEATURE: c-term amidation
  MOD_RES (2)..(2): Xaa is d-Ser
  MOD_RES (10)..(10): Acylated with a C14 fatty acyl group
HXQGTFTSDKSKYLDERRAKDFVQWLMNT

SEQ ID NO: 583 - protein, 30 aa, Artificial Sequence; identical to SEQ ID NO: 581
  Synthetic peptide
  MISC_FEATURE: Peptide dS2E16K20K30-C16 Gluc Amide
  MISC_FEATURE: c-term amidation
  MOD_RES (2)..(2): Xaa is d-Ser
  MOD_RES (30)..(30): Acylated with a C16 fatty acyl group

SEQ ID NO: 584 - protein, 29 aa, Artificial Sequence
  Synthetic peptide
  MISC_FEATURE: Peptide dS2K10(C16)E16K20-Gluc Amide
  MISC_FEATURE: c-term amidation
  MOD_RES (2)..(2): Xaa is d-Ser
  MOD_RES (10)..(10): Acylated with a C16 fatty acyl group
HXQGTFTSDKSKYLDERRAKDFVQWLMNT

SEQ ID NO: 585 - protein, 29 aa, Artificial Sequence
  Synthetic peptide
  MISC_FEATURE: Peptide Chimera 2-AIB2-K10-acylated
  MISC_FEATURE: c-term amidation
  MOD_RES (2)..(2): Aminoisobutryic Acid
  MOD_RES (10)..(10): Acylated with a C18 fatty acyl group
  MOD_RES (24)..(24): Pegylated
HXQGTFTSDKSKYLDEQAAKEFICWLMNT

SEQ ID NO: 586 - protein, 30 aa, Artificial Sequence
  Synthetic peptide
  MISC_FEATURE: Peptide Chimera 2-AIB2-K30-acylated
  MISC_FEATURE: c-term amidation
  MOD_RES (2)..(2): Aminoisobutryic Acid
  MOD_RES (24)..(24): Pegylated
  MOD_RES (30)..(30): Acylated with a C18 fatty acyl group
HXQGTFTSDYSKYLDEQAAKEFICWLMNTK

SEQ ID NO: 587 - protein, 29 aa, Artificial Sequence
  Synthetic peptide
  MISC_FEATURE: c-term amidation
  MOD_RES (1)..(1): DMIA
XSQGTFTSDYSKYLDERRAKDFVCWLMNT

SEQ ID NO: 588 - protein, 29 aa, Artificial Sequence
  Synthetic peptide
  MISC_FEATURE: c-term amidation
  MOD_RES (1)..(1): DMIA
  MOD_RES (16)..(20): Lactam ring between side chains of amino acids at positions 16 and 20
XSQGTFTSDYSKYLDERRAKDFVCWLMNT

SEQ ID NO: 589 - protein, 29 aa, Artificial Sequence
  Synthetic peptide
  MISC_FEATURE: c-term amidation
  MOD_RES (2)..(2): Aminoisobutryic Acid
HXEGTFTSDYSKYLDEQAAKEFICWLMNT

SEQ ID NO: 590 - protein, 29 aa, Artificial Sequence
  Synthetic peptide
  MISC_FEATURE: c-term amidation
  MOD_RES (2)..(2): Aminoisobutryic Acid
  MOD_RES (24)..(24): Pegylated
HXEGTFTSDYSKYLDEQAAKEFICWLMNT

SEQ ID NO: 591 - protein, 29 aa, Artificial Sequence
  Synthetic peptide
  MOD_RES (3)..(3): Xaa is a Glutamine analog
  MOD_RES (27)..(27): Xaa is Norleucine
HSXGTFTSDYSKYLDTRRAAEFVAWLXDE

SEQ ID NO: 592 - protein, 29 aa, Artificial Sequence
  Synthetic peptide
  MOD_RES (3)..(3): Xaa is a Glutamine analog
  MOD_RES (16)..(16): Xaa is Aib
HSXGTFTSDYSKYLDXRRAADFVAWLMDE

SEQ ID NO: 593 - protein, 29 aa, Artificial Sequence
  Synthetic peptide
  MOD_RES (27)..(27): Xaa is Norleucine
HSQGTFTSDYSKYLDTRRAAEFVAWLXDE

SEQ ID NO: 594 - protein, 29 aa, Artificial Sequence
  Synthetic peptide
  MOD_RES (3)..(3): Xaa is Acetamidomethyl-cysteine
  MOD_RES (27)..(27): Xaa is Norleucine
HSXGTFTSDYSKYLDTRRAAEFVAWLXDE

SEQ ID NO: 595 - protein, 29 aa, Artificial Sequence
  Synthetic peptide
  MOD_RES (3)..(3): Xaa is Acetyldiaminobutanoic acid
  MOD_RES (27)..(27): Xaa is Norleucine
HSXGTFTSDYSKYLDTRRAAEFVAWLXDE

SEQ ID NO: 596 - protein, 29 aa, Artificial Sequence
  Synthetic peptide
  MOD_RES (3)..(3): Xaa is carbamoyldiaminopropanoic acid
  MOD_RES (27)..(27): Xaa is Norleucine
HSXGTFTSDYSKYLDTRRAAEFVAWLXDE

SEQ ID NO: 597 - protein, 29 aa, Artificial Sequence
  Synthetic peptide
  MOD_RES (3)..(3): Xaa is Methylglutamine
  MOD_RES (27)..(27): Xaa is Norleucine
HSXGTFTSDYSKYLDTRRAAEFVAWLXDE

SEQ ID NO: 598 - protein, 29 aa, Artificial Sequence
  Synthetic peptide
  MOD_RES (3)..(3): Xaa is Methionine sulfoxide
  MOD_RES (27)..(27): Xaa is Norleucine
HSXGTFTSDYSKYLDTRRAAEFVAWLXDE

SEQ ID NO: 599 - protein, 29 aa, Artificial Sequence
  Synthetic peptide
  MOD_RES (3)..(3): Acetylornithine
  MOD_RES (27)..(27): Xaa is Norleucine
HSXGTFTSDYSKYLDTRRAAEFVAWLXDE

SEQ ID NO: 600 - protein, 29 aa, Artificial Sequence
  Synthetic peptide
  MOD_RES (16)..(16): Xaa is Aminoisobutryic Acid
HSQGTFTSDYSKYLDXRRAADFVAWLMDE

SEQ ID NO: 601 - protein, 29 aa, Artificial Sequence
  Synthetic peptide
  MOD_RES (3)..(3): Xaa is Acetyldiaminobutanoic acid
  MOD_RES (16)..(16): Xaa is Aminoisobutyric Acid
HSXGTFTSDYSKYLDXRRAADFVAWLMDE

SEQ ID NO: 602 - protein, 29 aa, Artificial Sequence
  Synthetic peptide
  MOD_RES (3)..(3): Xaa is Methylglutamine
  MOD_RES (16)..(16): Xaa is Aminoisobutyric Acid
HSXGTFTSDYSKYLDXRRAADFVAWLMDE

SEQ ID NO: 603 - protein, 29 aa, Artificial Sequence
  Synthetic peptide
  MOD_RES (3)..(3): Xaa is Acetyldiaminobutanoic acid
  MOD_RES (16)..(16): Xaa is Aminoisobutryic Acid
HSXGTFTSDYSKYLDXRRAADFVAWLLDE

SEQ ID NO: 604 - protein, 39 aa, Artificial Sequence
  Synthetic peptide
  MISC_FEATURE: c-term amidation
  MOD_RES (3)..(3): Xaa is Acetyldiaminobutanoic acid
  MOD_RES (16)..(16): Xaa is Aminoisobutyric Acid
HSXGTFTSDYSKYLDXRRAADFVAWLLDTGPSSGAPPPS

SEQ ID NO: 605 - protein, 29 aa, Artificial Sequence
  Synthetic peptide
  MOD_RES (3)..(3): Xaa is Acetyldiaminobutanoic acid
  MOD_RES (16)..(16): Xaa is Aminoisobutryic Acid
HSXGTFTSDYSKYLDXRRASDFVSWLLDE

SEQ ID NO: 606 - protein, 29 aa, Artificial Sequence
  Synthetic peptide
  MOD_RES (3)..(3): Xaa is Acetyldiaminobutanoic acid
  MOD_RES (16)..(16): Xaa is Aminoisobutryic Acid
HSXGTFTSDYSKYLDXRRATDFVTWLLDE

SEQ ID NO: 607 - protein, 29 aa, Artificial Sequence
  Synthetic peptide
  MISC_FEATURE: c-term amidation
  MOD_RES (1)..(1): Xaa is Dmia
  MOD_RES (10)..(10): Covalently bound to a C14 fatty acyl group
  MOD_RES (16)..(20): Lactam ring between side chains of amino acids at positions 16 and 20
XSQGTFTSDKSKYLDERRAKDFVQWLMNT

SEQ ID NO: 608 - protein, 29 aa, Artificial Sequence
  Synthetic peptide
  MISC_FEATURE: c-term amidation
  MOD_RES (1)..(1): DMIA
  MOD_RES (10)..(10): Covalently bound to C16 fatty acyl group
  MOD_RES (16)..(20): Lactam ring between side chains of amino acids at positions 16 and 20
XSQGTFTSDKSKYLDERRAKDFVQWLMNT

SEQ ID NO: 609 - protein, 29 aa, Artificial Sequence
  Synthetic peptide
  MISC_FEATURE: c-term amidation
  MOD_RES (1)..(1): DMIA
  MOD_RES (10)..(10): Covalently bound to C18 fatty acyl group
  MOD_RES (16)..(20): Lactam ring between side chains of amino acids at positions 16 and 20
XSQGTFTSDKSKYLDERRAKDFVQWLMNT

SEQ ID NO: 610 - protein, 29 aa, Artificial Sequence
  Synthetic peptide
  MISC_FEATURE: c-term amidation
  MOD_RES (2)..(2): Aminoisobutryic Acid
  MOD_RES (10)..(10): Covalently bound to C14 fatty acyl group
  MOD_RES (16)..(16): Aminoisobutryic Acid
HXQGTFTSDKSKYLDXRRAQDFVQWLMNT

SEQ ID NO: 611 - protein, 29 aa, Artificial Sequence
  Synthetic peptide
  MISC_FEATURE: c-term amidation
  MOD_RES (2)..(2): Aminoisobutryic Acid
  MOD_RES (10)..(10): Covalently bound to C16 fatty acyl group
  MOD_RES (16)..(16): Aminoisobutryic Acid
HXQGTFTSDKSKYLDXRRAQDFVQWLMNT

SEQ ID NO: 612 - protein, 29 aa, Artificial Sequence
  Synthetic peptide
  MISC_FEATURE: c-term amidation
  MOD_RES (2)..(2): Aminoisobutryic Acid
  MOD_RES (10)..(10): Covalently bound to C18 fatty acyl group
  MOD_RES (16)..(16): Aminoisobutryic Acid
HXQGTFTSDKSKYLDXRRAQDFVQWLMNT

SEQ ID NO: 613 - protein, 29 aa, Artificial Sequence
  Synthetic peptide
  MISC_FEATURE: c-term amidation
  MOD_RES (2)..(2): Xaa is d-Ser
  MOD_RES (10)..(10): Covalently bound to C14 fatty acyl group
HXQGTFTSDKSKYLDERRAKDFVQWLMNT

SEQ ID NO: 614 - protein, 29 aa, Artificial Sequence
  Synthetic peptide
  MISC_FEATURE: c-term amidation
  MOD_RES (2)..(2): Xaa is d-Ser
  MOD_RES (10)..(10): Covalently bound to C16 fatty acyl group
HXQGTFTSDKSKYLDERRAKDFVQWLMNT

SEQ ID NO: 615 - protein, 29 aa, Artificial Sequence
  Synthetic peptide
  MISC_FEATURE: c-term amidation
  MOD_RES (2)..(2): Xaa is d-Ser
  MOD_RES (10)..(10): Covalently bound to a C18 fatty acyl group
HXQGTFTSDKSKYLDERRAKDFVQWLMNT

SEQ ID NO: 616 - protein, 29 aa, Artificial Sequence
  Synthetic peptide
  MISC_FEATURE: c-term amidation
  MOD_RES (2)..(2): Aminoisobutyric Acid
  MOD_RES (10)..(10): Covalently bound to a C14 fatty acyl group
  MOD_RES (16)..(16): Aminoisobutyric Acid
HXQGTFTSDKSKYLDXRRAQDFVCWLMNT

SEQ ID NO: 617 - protein, 29 aa, Artificial Sequence
  Synthetic peptide
  MISC_FEATURE: c-term amidation
  MOD_RES (2)..(2): Aminoisobutryic Acid
  MOD_RES (10)..(10): Covalently bound to C14 fatty acyl group via gamma-Glu-gamma-Glu spacer
  MOD_RES (16)..(16): Aminoisobutryic Acid
HXQGTFTSDKSKYLDXRRAQDFVCWLMNT

SEQ ID NO: 618 - protein, 29 aa, Artificial Sequence
  Synthetic peptide
  MISC_FEATURE: c-term amidation
  MOD_RES (2)..(2): Aminoisobutryic Acid
  MOD_RES (10)..(10): Covalently bound to C14 fatty acyl group via Ala-Ala spacer
  MOD_RES (16)..(16): Aminoisobutryic Acid
HXQGTFTSDKSKYLDXRRAQDFVCWLMNT

SEQ ID NO: 619 - protein, 29 aa, Artificial Sequence
  Synthetic peptide
  MISC_FEATURE: c-term amidation
  MOD_RES (2)..(2): Aminoisobutyric Acid
  MOD_RES (10)..(10): Covalently bound to C16 fatty acyl group via di peptide spacer
  MOD_RES (16)..(16): Aminoisobutyric Acid
HXQGTFTSDKSKYLDXRRAQDFVCWLMNT

SEQ ID NO: 620 - protein, 29 aa, Artificial Sequence
  Synthetic peptide
  MISC_FEATURE: c-term amidation
  MOD_RES (2)..(2): Aminoisobutyric Acid
  MOD_RES (10)..(10): Covelently bound to C16 fatty acyl group via Ala-Ala spacer
  MOD_RES (16)..(16): Aminoisobutyric Acid
HXQGTFTSDKSKYLDXRRAQDFVCWLMNT

SEQ ID NO: 621 - protein, 29 aa, Artificial Sequence
  Synthetic peptide
  MISC_FEATURE: c-term amidation
  MOD_RES (2)..(2): Aminoisobutyric Acid
  MOD_RES (10)..(10): Covalently bound to C16 fatty acyl group
  MOD_RES (16)..(16): Aminoisobutyric Acid
HXQGTFTSDKSKYLDXRRAQDFVCWLMNT

SEQ ID NO: 622 - protein, 30 aa, Artificial Sequence
  Synthetic peptide
  MISC_FEATURE: c-term amidation
  MOD_RES (2)..(2): Aminoisobutyric Acid
  MOD_RES (10)..(10): Covalently bound to C16 fatty acyl group
  MOD_RES (16)..(16): Aminoisobutyric Acid
HXQGTFTSDKSKYLDXRRAQDFVCWLMNTK

SEQ ID NO: 623 - protein, 29 aa, Artificial Sequence
  Synthetic peptide
  MISC_FEATURE: beta-Ala-beta-Ala - C16 Glucagon Amide
  MISC_FEATURE: c-term amidation
  MISC_FEATURE (10)..(10): Acylated with a C16 fatty acyl group via beta-Ala-beta-Ala spacer
HSQGTFTSDKSKYLDSRRAQDFVQWLMNT

SEQ ID NO: 624 - protein, 29 aa, Artificial Sequence
  Synthetic peptide
  MISC_FEATURE: Chimera-2 Aib2C24Mal40KPEG
  MOD_RES (2)..(2): Xaa is Aib
  MOD_RES (24)..(24): Covalently bound to 40kDa PEG via thioether made by reaction of peptide with a maleimide-activated PEG
  MOD_RES (29)..(29): AMIDATION
HXQGTFTSDYSKYLDEQAAKEFICWLMNT

SEQ ID NO: 625 - protein, 29 aa, Artificial Sequence
  Synthetic peptide
  MISC_FEATURE: Chimera-2 Aib2E16K20lactamC24Mal40KPEG
  MOD_RES (2)..(2): Xaa is Aib
  MISC_FEATURE (16)..(20): Lactam ring between side chains of the amino acids at positions 16 and 20
  MOD_RES (24)..(24): Covalently bound to 40kDa PEG via thioether made by reaction of peptide with a maleimide-activated PEG
  MOD_RES (29)..(29): AMIDATION
HXQGTFTSDYSKYLDEQAAKEFICWLMNT

SEQ ID NO: 626 - protein, 29 aa, Artificial Sequence
  Synthetic peptide
  MISC_FEATURE: Glucagon Aib2E16K20lactamC24amideMal40KPEG
  MOD_RES (2)..(2): Xaa is Aib
  MISC_FEATURE (16)..(20): Lactam ring between side chains of amino acids at positions 16 and 20
  MOD_RES (24)..(24): Covalently bound to 40kDa PEG via thioether made by reaction of peptide with a maleimide-activated PEG
  MOD_RES (29)..(29): AMIDATION
HXQGTFTSDYSKYLDERRAKDFVCWLMNT

SEQ ID NO: 627 - skipped

SEQ ID NO: 628 - protein, 29 aa, Artificial Sequence
  Synthetic peptide
  MISC_FEATURE: Glucagon Dmia1E16K20lactamC24Mal40KPEG
  MOD_RES (1)..(1): Xaa is Dmia
  MISC_FEATURE (16)..(20): Lactam ring between side chains of amino acids at positions 16 and 20
  MOD_RES (24)..(24): Covalently bound to 40kDa PEG via thioether made by reaction of peptide with a maleimide-activated PEG
  MOD_RES (29)..(29): AMIDATION
XSQGTFTSDYSKYLDERRAKDFVCWLMNT

SEQ ID NO: 629 - protein, 29 aa, Artificial Sequence
  Synthetic peptide
  MISC_FEATURE: Glucagon Dmia1E16K20lactamC24Mal40KPEG
  MOD_RES (1)..(1): Xaa is Dmia
  MISC_FEATURE (16)..(20): Lactam ring between side chains of amino acids at positions 16 and 20
  MISC_FEATURE (24)..(24): Covalently bound to 40kDa PEG via thioether made by reaction of peptide with a maleimide-activated PEG
XSQGTFTSDYSKYLDERRAKDFVCWLMNT

SEQ ID NO: 630 - protein, 29 aa, Artificial Sequence
  Synthetic peptide
  MISC_FEATURE: Glucagon Dmia1E16K20lactamC24thioether40KPEG
  MOD_RES (1)..(1): Xaa is Dmia
  MISC_FEATURE (16)..(20): Lactam ring between side chains of amino acids at position 16 and 20
  MOD_RES (24)..(24): Covalently bound to 40kDa PEG via thioether made by reaction of peptide with haloacetyl-activated PEG
  MOD_RES (29)..(29): AMIDATION
XSQGTFTSDYSKYLDERRAKDFVCWLMNT

SEQ ID NO: 631 - protein, 29 aa, Artificial Sequence
  Synthetic peptide
  MISC_FEATURE: Chimera2 Aib2E3C24-Thioether40K PEG(NOF)
  MOD_RES (2)..(2): Xaa is Aib
  MOD_RES (24)..(24): Covalently bound to 40kDa PEG via thioether made by reaction of peptide with haloacetyl-activated PEG
  MOD_RES (29)..(29): AMIDATION
HXEGTFTSDYSKYLDEQAAKEFICWLMNT

SEQ ID NO: 632 - protein, 29 aa, Artificial Sequence
  Synthetic peptide
  MOD_RES (1)..(1): Xaa is Dmia
  MOD_RES (24)..(24): Covalently bound to 40kDa PEG
  MOD_RES (29)..(29): AMIDATION
XSEGTFTSDYSKYLEERRAKDFVCWLMNT

SEQ ID NO: 633 - protein, 29 aa, Artificial Sequence
  Synthetic peptide
  MISC_FEATURE: Glucagon Aib2Aib16C24K10(rErE-C16) C24PEG40K amide
  MOD_RES (2)..(2): Xaa is Aib
  MOD_RES (10)..(10): Covalently bound to C14 fatty acyl group via gamma-Glu-gamma-Glu spacer
  MOD_RES (16)..(16): Xaa is Aib
  MOD_RES (24)..(24): Covalently bound to 40kDa PEG via thioether made by reaction of peptide with haloacetyl-activated PEG
  MOD_RES (29)..(29): AMIDATION
HXQGTFTSDKSKYLDXRRAQDFVCWLMNT

SEQ ID NO: 634 - protein, 29 aa, Artificial Sequence
  Synthetic peptide
  MISC_FEATURE: Glucagon Aib2Aib16K10(AA-C14)C24PEG40K TE amide
  MOD_RES (2)..(2): Xaa is Aib
  MOD_RES (10)..(10): Covalently bound to C14 fatty acyl group via Ala-Ala spacer
  MOD_RES (16)..(16): Xaa is Aib
  MOD_RES (24)..(24): Covalently bound to 40kDa PEG via thioether made by reaction of peptide with haloacetyl-activated PEG
  MOD_RES (29)..(29): AMIDATION
HXQGTFTSDKSKYLDXRRAQDFVCWLMNT

SEQ ID NO: 635 - protein, 29 aa, Artificial Sequence
  Synthetic peptide
  MISC_FEATURE: Glucagon Aib2Aib16K10(AA-C16) amide
  MOD_RES (2)..(2): Xaa is Aib
  MOD_RES (10)..(10): Covalently bound to C16 fatty acyl group via Ala-Ala spacer
  MOD_RES (16)..(16): Xaa is Aib
  MOD_RES (29)..(29): AMIDATION
HXQGTFTSDKSKYLDXRRAQDFVQWLMNT

SEQ ID NO: 636 - protein, 29 aa, Artificial Sequence
  Synthetic peptide
  MISC_FEATURE: Glucagon Aib2Aib16K10(rErE-C16) amide
  MOD_RES (2)..(2): Xaa is Aib
  MOD_RES (10)..(10): Covalently bound to C16 fatty acyl group via gamma-Glu-gamma-Glu spacer
  MOD_RES (16)..(16): Xaa is Aib
  MOD_RES (29)..(29): AMIDATION
HXQGTFTSDKSKYLDXRRAQDFVQWLMNT

SEQ ID NO: 637 - protein, 29 aa, Artificial Sequence
  Synthetic peptide
  MOD_RES (2)..(2): Xaa is Aib
  MOD_RES (16)..(16): Xaa is Aib
  MOD_RES (29)..(29): AMIDATION
HXQGTFTSDYSKYLDXRRAQDFVQWLMNT

SEQ ID NO: 638 - DNA, 20 bp, Artificial Sequence
  Synthetic primer
caaggtccagggaggttgtg

SEQ ID NO: 639 - DNA, 24 bp, Artificial Sequence
  Synthetic primer
ccaaaggtaagctgtccataagga

SEQ ID NO: 640 - DNA, 22 bp, Artificial Sequence
  Synthetic primer
ctctcccaagagtcacatgtcc

SEQ ID NO: 641 - DNA, 22 bp, Artificial Sequence
  Synthetic primer
caataactcggtcccctacaac

SEQ ID NO: 642 - protein, 29 aa, Artificial Sequence
  Synthetic peptide
HSQGTFTSDYSKYLDSRRAQDFVQWLMDT

SEQ ID NO: 643 - protein, 29 aa, Artificial Sequence
  Synthetic peptide
  MISC_FEATURE: c-term amidation
  MOD_RES (2)..(2): Xaa is d-Ser
  MOD_RES (10)..(10): Acylated with a C16 fatty acyl group via gamma-Glu spacer
HXQGTFTSDKSKYLDEQAAKEFIAWLMNT

SEQ ID NO: 644 - protein, 29 aa, Artificial Sequence
  Synthetic peptide
  MISC_FEATURE: c-term amidation
  MOD_RES (2)..(2): Xaa is d-Ser
  MOD_RES (10)..(10): Acylated with a C16 fatty acyl group via gamma-Glu-gamma-Glu spacer
HXQGTFTSDKSKYLDEQAAKEFIAWLMNT

SEQ ID NO: 645 - protein, 29 aa, Artificial Sequence
  Synthetic peptide
  MISC_FEATURE: c-term amidation
  MOD_RES (2)..(2): Xaa is Aib
  MOD_RES (10)..(10): Acylated with a C16 fatty acyl group via gamma-Glu spacer
HXQGTFTSDKSKYLDEQAAKEFIAWLMNT

SEQ ID NO: 646 - protein, 29 aa, Artificial Sequence
  Synthetic peptide
  MISC_FEATURE: c-term amidation
  MOD_RES (2)..(2): Xaa is Aib
  MOD_RES (10)..(10): Acylated with a C16 fatty acyl group via gamma-Glu-gamma-Glu spacer
HXQGTFTSDKSKYLDEQAAKEFIAWLMNT

SEQ ID NO: 647 - protein, 29 aa, Artificial Sequence
  Synthetic peptide
  MISC_FEATURE: c-term amidation
  MOD_RES (2)..(2): Xaa is Aib
  MOD_RES (10)..(10): Acylated with a C16 fatty acyl group
HXEGTFTSDKSKYLDEQAAKEFIAWLMNT

SEQ ID NO: 648 - protein, 29 aa, Artificial Sequence
  Synthetic peptide
  MISC_FEATURE: c-term amidation
  MOD_RES (2)..(2): Xaa is Aib
  MOD_RES (10)..(10): Acylated with a C16 fatty acyl group via gamma-Glu-gamma-Glu spacer
HXEGTFTSDKSKYLDEQAAKEFIAWLMNT

SEQ ID NO: 649 - protein, 29 aa, Artificial Sequence
  Synthetic peptide
  MISC_FEATURE: c-term amidation
  MOD_RES (2)..(2): Xaa is Aib
  MOD_RES (10)..(10): Acylated with a C16 fatty acyl group via gamma-Glu spacer
HXQGTFISDKSKYLDEQAAKEFIAWLMNT

SEQ ID NO: 650 - protein, 29 aa, Artificial Sequence
  Synthetic peptide
  MISC_FEATURE: c-term amidation
  MOD_RES (2)..(2): Xaa is Aib
  MOD_RES (10)..(10): Acylated with a C16 fatty acyl group via gamma-Glu-gamma-Glu spacer
HXQGTFISDKSKYLDEQAAKEFIAWLMNT

SEQ ID NO: 651 - protein, 29 aa, Artificial Sequence
  Synthetic peptide
  MISC_FEATURE: c-term amidation
  MOD_RES (1)..(1): Xaa is Dmia
  MOD_RES (10)..(10): Acylated with a C16 fatty acyl group via gamma-Glu spacer
  MISC_FEATURE (16)..(20): Lactam ring between side chains of amino acids at positions 16 and 20
XSQGTFTSDKSKYLDERRAKDFVQWLMNT

SEQ ID NO: 652 - protein, 29 aa, Artificial Sequence
  Synthetic peptide
  MISC_FEATURE: c-term amidation
  MOD_RES (1)..(1): Xaa is Dmia
  MOD_RES (10)..(10): Acylated with a C16 fatty acyl group via gamma-Glu-gamma-Glu spacer
  MISC_FEATURE (16)..(20): Lactam ring between side chains of amino acids at positions 16 and 20
XSQGTFTSDKSKYLDERRAKDFVQWLMNT

SEQ ID NO: 653 - protein, 29 aa, Artificial Sequence
  Synthetic peptide
  MISC_FEATURE: c-term amidation
  MOD_RES (1)..(1): Xaa is Dmia
  MISC_FEATURE (16)..(20): Lactam ring between side chains of amino acids at positions 16 and 20
  MOD_RES (29)..(29): Acylated with a C16 fatty acyl group via gamma-Glu spacer
XSQGTFTSDYSKYLDERRAKDFVQWLMNK

SEQ ID NO: 654 - protein, 29 aa, Artificial Sequence
  Synthetic peptide
  MISC_FEATURE: c-term amidation
  MOD_RES (1)..(1): Xaa is Dmia
  MISC_FEATURE (16)..(20): Lactam ring between side chains of amino acids at positions 16 and 20
  MOD_RES (29)..(29): Acylated with a C16 fatty acyl group via gamma-Glu-gamma-Glu spacer
XSQGTFTSDYSKYLDERRAKDFVQWLMNK

SEQ ID NO: 655 - protein, 29 aa, Artificial Sequence
  Synthetic peptide
  MISC_FEATURE: c-term amidation
  MOD_RES (2)..(2): Xaa is Aib
  MOD_RES (10)..(10): Acylated with a C16 fatty acyl group via gamma-Glu-gamma-Glu spacer
  MOD_RES (16)..(16): Xaa is Aib
HXQGTFTSDKSKYLDXRAAQDFVQWLMDT

SEQ ID NO: 656 - protein, 29 aa, Artificial Sequence
  Synthetic peptide
  MISC_FEATURE: c-term amidation
  MOD_RES (2)..(2): Xaa is Aib
  MOD_RES (10)..(10): Acylated with a C16 fatty acyl group via gamma-Glu spacer
  MOD_RES (16)..(16): Xaa is Aib
HXQGTFTSDKSKYLDXRAAQDFVQWLMDT

SEQ ID NO: 657 - protein, 29 aa, Artificial Sequence
  Synthetic peptide
  MISC_FEATURE: c-term amidation
  MOD_RES (2)..(2): Aminoisobutryic Acid
  MOD_RES (10)..(10): Acylated with a C16 fatty acyl group via dipeptide spacer
  MOD_RES (16)..(16): Aminoisobutryic Acid
HXQGTFTSDKSKYLDXRRAQDFVQWLMNT

SEQ ID NO: 658 - protein, 29 aa, Artificial Sequence
  Synthetic peptide
  MISC_FEATURE: c-term amidation
  MOD_RES (2)..(2): Aminoisobutyric Acid
  MOD_RES (10)..(10): Acylated with a C14 fatty acyl group via dipeptide spacer
  MOD_RES (16)..(16): Aminoisobutyric Acid
  MOD_RES (24)..(24): Pegylated
HXQGTFTSDKSKYLDXRRAQDFVCWLMNT

SEQ ID NO: 659 - protein, 29 aa, Artificial Sequence
  Synthetic peptide
  MISC_FEATURE: c-term amidation
  MOD_RES (2)..(2): Aminoisobutryic Acid
  MOD_RES (10)..(10): Acylated with a C14 fatty acyl group via dipeptide spacer
  MOD_RES (16)..(16): Aminoisobutryic Acid
HXQGTFTSDKSKYLDXRRAQDFVQWLMNT

SEQ ID NO: 660 - protein, 29 aa, Artificial Sequence
  Synthetic peptide
  MISC_FEATURE: c-term amidation
  MOD_RES (2)..(2): Aminoisobutryic Acid
  MOD_RES (10)..(10): Acylated with a C16 fatty acyl group via dipeptide spacer
  MOD_RES (16)..(16): Aminoisobutryic Acid
  MOD_RES (24)..(24): Pegylated
HXQGTFTSDKSKYLDXRRAQDFVCWLMNT

SEQ ID NO: 661 - protein, 29 aa, Artificial Sequence
  Synthetic peptide
  MISC_FEATURE: c-term amidation
  MOD_RES (10)..(10): Acylated with a C16 fatty acyl group via dipeptide spacer
HSQGTFTSDKSKYLDSRRAQDFVQWLMNT

SEQ ID NO: 662 - protein, 30 aa, Artificial Sequence; identical to SEQ ID NO: 581
  Synthetic peptide
  MISC_FEATURE: Peptide dS2E16K20K30-C14 Gluc Amide
  MISC_FEATURE: c-term amidation
  MOD_RES (2)..(2): D-serine, D-alanine, valine, amino n-butyric acid, glycine, N-methyl serine, aminoisobutyric acid
  MOD_RES (30)..(30): Acylated with a C14 fatty acyl group

SEQ ID NO: 663 - protein, 29 aa, Artificial Sequence
  Synthetic peptide
  MISC_FEATURE: Peptide dS2K10(C14)E16K20-Gluc Amide
  MISC_FEATURE: c-term amidation
  MOD_RES (2)..(2): D-serine, D-alanine, valine, amino n-butyric acid, glycine, N-methyl serine, aminoisobutyric acid
  MOD_RES (10)..(10): Acylated with a C14 fatty acyl group
HXQGTFTSDKSKYLDERRAKDFVQWLMNT

SEQ ID NO: 664 - protein, 30 aa, Artificial Sequence; identical to SEQ ID NO: 581
  Synthetic peptide
  MISC_FEATURE: Peptide dS2E16K20K30-C16 Gluc Amide
  MISC_FEATURE: c-term amidation
  MOD_RES (2)..(2): D-serine, D-alanine, valine, amino n-butyric acid, glycine, N-methyl serine, aminoisobutyric acid
  MOD_RES (30)..(30): Acylated with a C16 fatty acyl group

SEQ ID NO: 665 - protein, 29 aa, Artificial Sequence
  Synthetic peptide
  MISC_FEATURE: Peptide dS2K10(C16)E16K20-Gluc Amide
  MISC_FEATURE: c-term amidation
  MOD_RES (2)..(2): D-serine, D-alanine, valine, amino n-butyric acid, glycine, N-methyl serine, aminoisobutyric acid
  MOD_RES (10)..(10): Acylated with a C16 fatty acyl group
HXQGTFTSDKSKYLDERRAKDFVQWLMNT

SEQ ID NO: 666 - protein, 29 aa, Artificial Sequence
  Synthetic peptide
  MISC_FEATURE: c-term amidation
  MOD_RES (2)..(2): D-serine, D-alanine, valine, amino n-butyric acid, glycine, N-methyl serine, aminoisobutyric acid
  MOD_RES (10)..(10): Covalently bound to C14 fatty acyl group
HXQGTFTSDKSKYLDERRAKDFVQWLMNT

SEQ ID NO: 667 - protein, 29 aa, Artificial Sequence
  Synthetic peptide
  MISC_FEATURE: c-term amidation
  MOD_RES (2)..(2): D-serine, D-alanine, valine, amino n-butyric acid, glycine, N-methyl serine, aminoisobutyric acid
  MOD_RES (10)..(10): Covalently bound to C16 fatty acyl group
HXQGTFTSDKSKYLDERRAKDFVQWLMNT

SEQ ID NO: 668 - protein, 29 aa, Artificial Sequence
  Synthetic peptide
  MISC_FEATURE: c-term amidation
  MOD_RES (2)..(2): D-serine, D-alanine, valine, amino n-butyric acid, glycine, N-methyl serine, aminoisobutyric acid
  MOD_RES (10)..(10): Covalently bound to a C18 fatty acyl group
HXQGTFTSDKSKYLDERRAKDFVQWLMNT

SEQ ID NO: 669 - protein, 29 aa, Artificial Sequence
  Synthetic peptide
  MISC_FEATURE: c-term amidation
  MOD_RES (2)..(2): Aminoisobutryic Acid
  MOD_RES (10)..(10): Covalently bound to C14 fatty acyl group via dipeptide spacer
  MOD_RES (16)..(16): Aminoisobutryic Acid
HXQGTFTSDKSKYLDXRRAQDFVCWLMNT

SEQ ID NO: 670 - protein, 29 aa, Artificial Sequence
  Synthetic peptide
  MISC_FEATURE: Glucagon Aib2Aib16C24K10(rErE-C16) C24PEG40K amide
  MOD_RES (2)..(2): Xaa is Aib
  MOD_RES (10)..(10): Covalently bound to C14 fatty acyl group via dipeptide spacer
  MOD_RES (16)..(16): Xaa is Aib
  MOD_RES (24)..(24): Covalently bound to 40kDa PEG via thioether made by reaction of peptide with haloacetyl-activated PEG
  MOD_RES (29)..(29): AMIDATION
HXQGTFTSDKSKYLDXRRAQDFVCWLMNT

SEQ ID NO: 671 - protein, 29 aa, Artificial Sequence
  Synthetic peptide
  MISC_FEATURE: Glucagon Aib2Aib16K10(rErE-C16) amide
  MOD_RES (2)..(2): Xaa is Aib
  MOD_RES (10)..(10): Covalently bound to C16 fatty acyl group via dipeptide spacer
  MOD_RES (16)..(16): Xaa is Aib
  MOD_RES (29)..(29): AMIDATION
HXQGTFTSDKSKYLDXRRAQDFVQWLMNT

SEQ ID NO: 672 - protein, 29 aa, Artificial Sequence
  Synthetic peptide
  MISC_FEATURE: c-term amidation
  MOD_RES (2)..(2): D-serine, D-alanine, valine, amino n-butyric acid, glycine, N-methyl serine, aminoisobutyric acid
  MOD_RES (10)..(10): Acylated with a C16 fatty acyl group via acidic amino acid spacer
HXQGTFTSDKSKYLDEQAAKEFIAWLMNT

SEQ ID NO: 673 - protein, 29 aa, Artificial Sequence
  Synthetic peptide
  MISC_FEATURE: c-term amidation
  MOD_RES (2)..(2): D-serine, D-alanine, valine, amino n-butyric acid, glycine, N-methyl serine, aminoisobutyric acid
  MOD_RES (10)..(10): Acylated with a C16 fatty acyl group via dipeptide spacer
HXQGTFTSDKSKYLDEQAAKEFIAWLMNT

SEQ ID NO: 674 - protein, 29 aa, Artificial Sequence
  Synthetic peptide
  MISC_FEATURE: c-term amidation
  MOD_RES (2)..(2): Xaa is Aib
  MOD_RES (10)..(10): Acylated with a C16 fatty acyl group via acidic amino acid spacer
HXQGTFTSDKSKYLDEQAAKEFIAWLMNT

SEQ ID NO: 675 - protein, 29 aa, Artificial Sequence
  Synthetic peptide
  MISC_FEATURE: c-term amidation
  MOD_RES (2)..(2): Xaa is Aib
  MOD_RES (10)..(10): Acylated with a C16 fatty acyl group via dipeptide spacer
HXQGTFTSDKSKYLDEQAAKEFIAWLMNT

SEQ ID NO: 676 - protein, 29 aa, Artificial Sequence
  Synthetic peptide
  MISC_FEATURE: c-term amidation
  MOD_RES (2)..(2): Xaa is Aib
  MOD_RES (10)..(10): Acylated with a C16 fatty acyl group via dipeptide spacer
HXEGTFTSDKSKYLDEQAAKEFIAWLMNT

SEQ ID NO: 677 - protein, 29 aa, Artificial Sequence
  Synthetic peptide
  MISC_FEATURE: c-term amidation
  MOD_RES (2)..(2): Xaa is Aib
  MOD_RES (10)..(10): Acylated with a C16 fatty acyl group via acidic amino acid spacer
HXQGTFISDKSKYLDEQAAKEFIAWLMNT

SEQ ID NO: 678 - protein, 29 aa, Artificial Sequence
  Synthetic peptide
  MISC_FEATURE: c-term amidation
  MOD_RES (2)..(2): Xaa is Aib
  MOD_RES (10)..(10): Acylated with a C16 fatty acyl group via dipeptide spacer
HXQGTFISDKSKYLDEQAAKEFIAWLMNT

SEQ ID NO: 679 - protein, 29 aa, Artificial Sequence
  Synthetic peptide
  MISC_FEATURE: c-term amidation
  MOD_RES (1)..(1): Xaa is Dmia
  MOD_RES (10)..(10): Acylated with a C16 fatty acyl group via acidic amino acid spacer
  MISC_FEATURE (16)..(20): Lactam ring between side chains of amino acids at positions 16 and 20
XSQGTFTSDKSKYLDERRAKDFVQWLMNT

SEQ ID NO: 680 - protein, 29 aa, Artificial Sequence
  Synthetic peptide
  MISC_FEATURE: c-term amidation
  MOD_RES (1)..(1): Xaa is Dmia
  MOD_RES (10)..(10): Acylated with a C16 fatty acyl group via dipeptide spacer
  MISC_FEATURE (16)..(20): Lactam ring between side chains of amino acids at positions 16 and 20
XSQGTFTSDKSKYLDERRAKDFVQWLMNT

SEQ ID NO: 681 - protein, 29 aa, Artificial Sequence
  Synthetic peptide
  MISC_FEATURE: c-term amidation
  MOD_RES (1)..(1): Xaa is Dmia
  MISC_FEATURE (16)..(20): Lactam ring between side chains of amino acids at positions 16 and 20
  MOD_RES (29)..(29): Acylated with a C16 fatty acyl group via acidic amino acid spacer
XSQGTFTSDYSKYLDERRAKDFVQWLMNK

SEQ ID NO: 682 - protein, 29 aa, Artificial Sequence
  Synthetic peptide
  MISC_FEATURE: c-term amidation
  MOD_RES (1)..(1): Xaa is Dmia
  MISC_FEATURE (16)..(20): Lactam ring between side chains of amino acids at positions 16 and 20
  MOD_RES (29)..(29): Acylated with a C16 fatty acyl group via dipeptide spacer
XSQGTFTSDYSKYLDERRAKDFVQWLMNK

SEQ ID NO: 683 - protein, 29 aa, Artificial Sequence
  Synthetic peptide
  MISC_FEATURE: c-term amidation
  MOD_RES (2)..(2): Xaa is Aib
  MOD_RES (10)..(10): Acylated with a C16 fatty acyl group via dipeptide spacer
  MOD_RES (16)..(16): Xaa is Aib
HXQGTFTSDKSKYLDXRAAQDFVQWLMDT

SEQ ID NO: 684 - protein, 29 aa, Artificial Sequence
  Synthetic peptide
  MISC_FEATURE: c-term amidation
  MOD_RES (2)..(2): Xaa is Aib
  MOD_RES (10)..(10): Acylated with a C16 fatty acyl group via acidic amino acid spacer
  MOD_RES (16)..(16): Xaa is Aib
HXQGTFTSDKSKYLDXRAAQDFVQWLMDT

SEQ ID NO: 685-700 - skipped (16 entries)

SEQ ID NO: 701 - protein, 29 aa, Homo sapiens
  MOD_RES (29)..(29): C-terminal amidation
HSQGTFTSDYSKYLDSRRAQDFVQWLMNT

SEQ ID NO: 702 - protein, 24 aa, Artificial Sequence
  Glucagon analog
  MOD_RES (1)..(1): N-terminal amino group replaced with hydroxy group
FTSDYSKYLDSRRAQDFVQWLMNT

SEQ ID NO: 703 - protein, 31 aa, Homo sapiens; identical to SEQ ID NO: 50

SEQ ID NO: 704 - protein, 30 aa, Homo sapiens; identical to SEQ ID NO: 52
  MOD_RES (30)..(30): AMIDATION

SEQ ID NO: 705 - protein, 28 aa, Homo sapiens
HGEGTFTSDLSKQMEEAVRLFIEWLKNG

SEQ ID NO: 706 - protein, 37 aa, Homo sapiens
HSQGTFTSDYSKYLDSRRAQDFVQWLMDTKRNRNNIA

SEQ ID NO: 707 - protein, 42 aa, Homo sapiens
YAEGTFISDYSIAMDKIHQQDFVNWLLAQKGKKNDWKHNITQ

SEQ ID NO: 708 - protein, 33 aa, Homo sapiens
HADGSFSDEMNTILDNLAARDFINWLIQTKITD

SEQ ID NO: 709 - protein, 49 aa, Homo sapiens
YLYQWLGAPVPYPDPLEPRREVCELNPDCDELADHIGFQEAYRRFYGPV

SEQ ID NO: 710 - protein, 10 aa, Artificial Sequence
  peptide fragment representing the carboxy terminal 10 amino acids of Exendin-4
GPSSGAPPPS

SEQ ID NO: 711 - protein, 10 aa, Artificial Sequence
  peptide fragment representing the carboxy terminal 10 amino acids of Exendin-4
  MOD_RES (10)..(10): AMIDATION
GPSSGAPPPS

SEQ ID NO: 712 - protein, 11 aa, Artificial Sequence
  peptide fragment representing the carboxy terminal 10 amino acids of Exendin-4
  MOD_RES (11)..(11): Pegylation
GPSSGAPPPSC

SEQ ID NO: 713 - protein, 13 aa, Artificial Sequence
  peptide fragment representing the carboxy terminal 13 amino acids of GIP peptide
KGKKNDWKHNITQ

SEQ ID NO: 714 - protein, 8 aa, Artificial Sequence
  peptide fragment representing the carboxy terminal 8 amino acids of oxyntomodulin
KRNRNNIA

SEQ ID NO: 715 - protein, 6 aa, Artificial Sequence
  Glucagon analogue
  MOD_RES (6)..(6): C-terminal amide
HTRGTF

SEQ ID NO: 716 - protein, 6 aa, Artificial Sequence
  glucagon analogue
  MOD_RES (1)..(1): d-histidine
  MOD_RES (2)..(2): d-threonine
  MOD_RES (3)..(3): d-arginine
  MOD_RES (5)..(5): d-threonine
  MOD_RES (6)..(6): d-phenylalanine
  MOD_RES (6)..(6): C-terminal amidation
XXXGXX

SEQ ID NO: 717 - protein, 30 aa, Artificial Sequence
  glucagon analogue
  MOD_RES (24)..(24): pegylation
HAEGTFTSDVSSYLEGQAAKEFICWLVKGR

SEQ ID NO: 718 - protein, 39 aa, Heloderma suspectum
HGEGTFTSDLSKQMEEEAVRLFIEWLKNGGPSSGAPPPS

SEQ ID NO: 719 - protein, 29 aa, Homo sapiens
YADAIFTNSYRKVLGQLSARKLLQDIMSR

SEQ ID NO: 720 - protein, 28 aa, Homo sapiens
  MOD_RES (28)..(28): AMIDATION
HSDAVFTDNYTRLRKQMAVKKYLNSILN

SEQ ID NO: 721 - protein, 27 aa, Homo sapiens
HSDGIFTDSYSRYRKQMAVKKYLAAVL

SEQ ID NO: 722 - protein, 27 aa, Homo sapiens
  MOD_RES (27)..(27): AMIDATION
HADGVFTSDFSKLLGQLSAKKYLESLM

SEQ ID NO: 723 - protein, 27 aa, Homo sapiens
  MOD_RES (27)..(27): AMIDATION
HSDGTFTSELSRLREGARLQRLLQGLV

SEQ ID NO: 724 - protein, 30 aa, Artificial Sequence
  Synthetic peptide
  MOD_RES (2)..(2): Xaa is AIB
  MOD_RES (24)..(24): Cys residue linked to 40kDa PEG via maleimide
  MOD_RES (30)..(30): C-terminal amidation
HXQGTFTSDYSKYLDEQAAKEFICWLMNTN

SEQ ID NO: 725 - protein, 29 aa, Artificial Sequence
  Synthetic peptide
  MOD_RES (2)..(2): Xaa is AIB
  MISC_FEATURE (24)..(24): Covalently bound to 40K PEG via thioether
  MOD_RES (29)..(29): AMIDATION
HXEGTFTSDYSKYLDEQAAKEFICWLMNT

SEQ ID NO: 726 - protein, 31 aa, Artificial Sequence
  Synthetic peptide
  MOD_RES (1)..(1): d-lysine
  MOD_RES (2)..(2): Sarcosine (N-methyl glycine)
  MOD_RES (4)..(4): Xaa is AIB
  MOD_RES (24)..(24): Covalently bound to 40kDa PEG via thioether
  MOD_RES (31)..(31): AMIDATION
KGHXEGTFTSDYSKYLDEQAAKEFICWLMNT

SEQ ID NO: 727 - protein, 31 aa, Artificial Sequence; identical to SEQ ID NO: 726
  Synthetic peptide
  MOD_RES (1)..(1): d-lysine
  MOD_RES (2)..(2): N-hexyl-glycine
  MOD_RES (4)..(4): Xaa is AIB
  MOD_RES (24)..(24): Covalently bound to 40kDa PEG via maleimide
  MOD_RES (31)..(31): AMIDATION

SEQ ID NO: 728 - protein, 31 aa, Artificial Sequence
  Synthetic peptide
  MOD_RES (1)..(1): d-lysine
  MOD_RES (2)..(2): N-methyl phenylalanine
  MOD_RES (4)..(4): Xaa is AIB
  MOD_RES (24)..(24): Covalently bound to 40kDa PEG via thioether
  MOD_RES (31)..(31): AMIDATION
KFHXEGTFTSDYSKYLDEQAAKEFICWLMNT

SEQ ID NO: 729 - protein, 29 aa, Artificial Sequence
  Synthetic peptide
  MOD_RES (2)..(2): Xaa is AIB
  MOD_RES (24)..(24): Covalently bound to 40 kDa PEG via maleimide
HXEGTFTSDYSKYLDEQAAKEFICWLMNT

SEQ ID NO: 730 - protein, 29 aa, Artificial Sequence
  Synthetic peptide
  MOD_RES (1)..(1): Xaa is DMIA
  MISC_FEATURE (16)..(20): Lactam ring between side chains of amino acids
  MOD_RES (24)..(24): Covalently bound to 40kDa PEG via maleimide
  MOD_RES (29)..(29): C-terminal amidation
XSQGTFTSDKSKYLDERRAKDFVCWLMNT

SEQ ID NO: 731 - protein, 30 aa, Artificial Sequence
  Synthetic peptide
  MOD_RES (30)..(30): C-terminal amidation
HSQGTFTSDYSKYLDEQAAKEFIAWLMNTN

SEQ ID NO: 732 - protein, 8 aa, Artificial Sequence
  Synthetic peptide
  MOD_RES (1)..(1): Xaa is Phe, hydroxyl-Phe, Gly, hydroxyl-Gly, Ala, Cys, Ser, Lys, Glu, dehydro-Val, Pro, d-Pro, AIB, 1-aminocyclohexanecarboxylic acid, 1-aminocyclopropanecarboxylic acid, N-Me-AIB, alpha-alpha-diethyl-Gly, hydroxyl-AIB, or d-Lys
  MOD_RES (2)..(2): Xaa is Pro, d-Pro, N-methyl-Gly, N-hexyl-Gly, Azetidine-2-carboxylic acid, N-methyl-Ala, or N-methyl-Phe
  MOD_RES (3)..(3): Xaa is His, d-His, Ala, or N-methyl-His
  MOD_RES (8)..(8): C-terminal amidation
XXXSRGTF

SEQ ID NO: 733 - protein, 31 aa, Artificial Sequence
  Synthetic peptide
  MOD_RES (1)..(1): d-Lys
  MOD_RES (2)..(2): Xaa is Sar
  MOD_RES (4)..(4): Xaa is AIB
  MOD_RES (26)..(26): Covalently bound to PEG via 40kDa maleimide
KXHXEGTFTSDYSKYLDEQAAKEFICWLMNT

SEQ ID NO: 734 - protein, 32 aa, Artificial Sequence
  Synthetic peptide
  MOD_RES (1)..(1): d-Lys
  MOD_RES (2)..(2): Xaa is Sar
  MOD_RES (4)..(4): Xaa is AIB
  MOD_RES (26)..(26): Cys residue linked to 40kDa PEG via maleimide
  MOD_RES (32)..(32): C-terminal amidation
KXHXQGTFTSDYSKYLDEQAAKEFICWLMNTN

SEQ ID NO: 735 - protein, 31 aa, Artificial Sequence
  Synthetic peptide
  MOD_RES (1)..(1): d-Lys
  MOD_RES (2)..(2): Xaa is Sar
  MOD_RES (3)..(3): Xaa is DMIA
  MISC_FEATURE (18)..(22): Lactam ring between side chains of amino acids
  MOD_RES (26)..(26): Covalently bound to 40kDa PEG via maleimide
  MOD_RES (31)..(31): C-terminal amidation
KXXSQGTFTSDKSKYLDERRAKDFVCWLMNT

SEQ ID NO: 736 - protein, 31 aa, Artificial Sequence; identical to SEQ ID NO: 726
  Synthetic peptide
  MOD_RES (1)..(1): d-Lys
  MOD_RES (2)..(2): N-hexyl-Gly
  MOD_RES (4)..(4): Xaa is AIB
  MISC_FEATURE (26)..(26): Covalently bound to 40K PEG via thioether
  MOD_RES (31)..(31): AMIDATION

SEQ ID NO: 737 - protein, 32 aa, Artificial Sequence
  Synthetic peptide
  MOD_RES (1)..(1): d-Lys
  MOD_RES (2)..(2): N-hexyl-Gly
  MOD_RES (4)..(4): Xaa is AIB
  MOD_RES (26)..(26): Cys residue linked to 40kDa PEG via maleimide
  MOD_RES (32)..(32): C-terminal amidation
KGHXQGTFTSDYSKYLDEQAAKEFICWLMNTN

SEQ ID NO: 738 - protein, 31 aa, Artificial Sequence
  Synthetic peptide
  MOD_RES (1)..(1): d-Lys
  MOD_RES (2)..(2): N-hexyl-Gly
  MOD_RES (3)..(3): Xaa is DMIA
  MISC_FEATURE (18)..(22): Lactam ring between side chains of amino acids
  MOD_RES (26)..(26): Covalently bound to 40kDa PEG via maleimide
  MOD_RES (31)..(31): C-terminal amidation
KGXSQGTFTSDKSKYLDERRAKDFVCWLMNT

SEQ ID NO: 739 - protein, 31 aa, Artificial Sequence; identical to SEQ ID NO: 728
  Synthetic peptide
  MOD_RES (1)..(1): d-Lys
  MOD_RES (2)..(2): N-methyl-Phe
  MOD_RES (4)..(4): Xaa is AIB
  MOD_RES (26)..(26): Covalently bound to 40kDa PEG via maleimide

SEQ ID NO: 740 - protein, 32 aa, Artificial Sequence
  Synthetic peptide
  MOD_RES (1)..(1): d-Lys
  MOD_RES (2)..(2): N-methyl-Phe
  MOD_RES (4)..(4): Xaa is AIB
  MOD_RES (26)..(26): Cys residue linked to 40kDa PEG via maleimide
  MOD_RES (32)..(32): C-terminal amidation
KFHXQGTFTSDYSKYLDEQAAKEFICWLMNTN

SEQ ID NO: 741 - protein, 31 aa, Artificial Sequence
  Synthetic peptide
  MOD_RES (1)..(1): d-Lys
  MOD_RES (2)..(2): N-methyl-Phe
  MOD_RES (3)..(3): Xaa is DMIA
  MISC_FEATURE (18)..(22): Lactam ring between side chains of amino acids
  MOD_RES (26)..(26): Covalently bound to 40kDa PEG via maleimide
  MOD_RES (31)..(31): C-terminal amidation
KFXSQGTFTSDKSKYLDERRAKDFVCWLMNT

SEQ ID NO: 742 - protein, 29 aa, Artificial Sequence
  Synthetic peptide
  MOD_RES (2)..(2): Xaa is AIB
  MOD_RES (24)..(24): Pegylated
  MOD_RES (29)..(29): C-terminal amidation
HXEGTFTSDYSKYLDEQAAKEFICWLMNT

SEQ ID NO: 743 - protein, 29 aa, Artificial Sequence
  Synthetic peptide
  MOD_RES (2)..(2): Xaa is AIB
  MOD_RES (10)..(10): Acylated with fatty acyl group
  MOD_RES (16)..(16): Xaa is AIB
  MOD_RES (29)..(29): C-terminal amidation
HXQGTFTSDKSKYLDXRAAQDFVQWLMDT

SEQ ID NO: 744 - protein, 40 aa, Artificial Sequence
  Synthetic peptide
  MOD_RES (2)..(2): Xaa is AIB
  MOD_RES (40)..(40): C-terminal amidation
HXEGTFTSDVSSYLEEQAAKEFIAWLVKGGPSSGAPPPSK

SEQ ID NO: 745 - protein, 29 aa, Artificial Sequence
  Synthetic peptide
  MOD_RES (1)..(1): Xaa is Dmia
  MISC_FEATURE (16)..(20): Lactam ring between side chains of amino acids at positions 16 and 20
  MOD_RES (24)..(24): Pegylated
  MOD_RES (29)..(29): C-terminal amidation
XSQGTFTSDYSKYLDERRAKDFVCWLMNT

SEQ ID NO: 746 - protein, 29 aa, Artificial Sequence
  Synthetic peptide
  MOD_RES (2)..(2): d-Ser
  MISC_FEATURE (16)..(20): Lactam ring between side chains of amino acids at positions 16 and 20
  MOD_RES (24)..(24): Pegylated
  MOD_RES (29)..(29): C-terminal amidation
HSQGTFTSDYSLYLDERAAKDFVCWLLDT

SEQ ID NO: 747 - protein, 29 aa, Artificial Sequence
  Synthetic peptide
  MOD_RES (2)..(2): Xaa is AIB
  MOD_RES (16)..(16): Xaa is AIB
  MOD_RES (20)..(20): Xaa is AIB
  MOD_RES (24)..(24): Pegylated
  MOD_RES (29)..(29): C-terminal amidation
HXQGTFTSDYSKYLDXKRAXEFVCWLLDT

SEQ ID NO: 748 - protein, 29 aa, Artificial Sequence
  Synthetic peptide
  MOD_RES (2)..(2): Xaa is AIB
  MOD_RES (10)..(10): Acylated with fatty acyl group via dipeptide spacer
  MOD_RES (16)..(16): Xaa is AIB
  MOD_RES (29)..(29): C-terminal amidation
HXQGTFTSDKSKYLDXRAAQDFVQWLMDT

SEQ ID NO: 749 - protein, 29 aa, Artificial Sequence
  Synthetic peptide
  MOD_RES (2)..(2): Xaa is AIB
  MOD_RES (10)..(10): Acylated with fatty acyl group via acidic amino acid spacer
  MOD_RES (16)..(16): Xaa is AIB
  MOD_RES (29)..(29): C-terminal amidation
HXQGTFTSDKSKYLDXRAAQDFVQWLMDT

SEQ ID NO: 750 - protein, 29 aa, Artificial Sequence
  Synthetic peptide
  MOD_RES (2)..(2): d-Ser
  MOD_RES (10)..(10): Acylated with fatty acyl group via dipeptide spacer
  MOD_RES (16)..(16): Xaa is AIB
  MOD_RES (29)..(29): C-terminal amidation
HSQGTFTSDKSKYLDXRAAQDFVQWLMDT

SEQ ID NO: 751 - protein, 29 aa, Artificial Sequence
  Synthetic peptide
  MOD_RES (2)..(2): Xaa is AIB
  MOD_RES (10)..(10): Acylated with fatty acyl group via dipeptide spacer
  MOD_RES (16)..(16): Xaa is AIB
  MOD_RES (29)..(29): C-terminal amidation
HXQGTFTSDKSKYLDXRAAQDFVQWLLDT

SEQ ID NO: 752 - protein, 29 aa, Artificial Sequence
  Synthetic peptide
  MOD_RES (2)..(2): Xaa is AIB
  MOD_RES (10)..(10): Acylated with fatty acyl group via dipeptide spacer
  MOD_RES (29)..(29): C-terminal amidation
HXQGTFTSDKSKYLDERAAQDFVQWLMDT

SEQ ID NO: 753 - protein, 29 aa, Artificial Sequence
  Synthetic peptide
  MOD_RES (2)..(2): Xaa is AIB
  MOD_RES (10)..(10): Acylated with fatty acyl group via dipeptide spacer
  MOD_RES (16)..(16): Xaa is AIB
  MOD_RES (29)..(29): C-terminal amidation
HXQGTFTSDKSKYLEXRAAQDFVQWLMDT

SEQ ID NO: 754 - protein, 29 aa, Artificial Sequence
  Synthetic peptide
  MOD_RES (2)..(2): d-Ser
  MOD_RES (10)..(10): Acylated with fatty acyl group via acidic amino acid spacer
  MOD_RES (29)..(29): C-terminal amidation
HSQGTFTSDKSKYLDERAAQDFVQWLLDT

SEQ ID NO: 755 - protein, 29 aa, Artificial Sequence
  Synthetic peptide
  MOD_RES (2)..(2): Xaa is AIB
  MOD_RES (10)..(10): Acylated with fatty acyl group via acidic amino acid spacer
  MOD_RES (29)..(29): C-terminal amidation
HXQGTFTSDKSKYLDEQAAKEFIAWLLDT

SEQ ID NO: 756 - protein, 40 aa, Artificial Sequence
  Synthetic polypeptide
  MOD_RES (2)..(2): Xaa is Aib
  MOD_RES (20)..(20): Xaa is Aib
  MOD_RES (40)..(40): C-terminal amidation
YXEGTFTSDYSIYLDKQAAXEFVNWLLAGGPSSGAPPPSK

SEQ ID NO: 757 - protein, 39 aa, Artificial Sequence
  Synthetic polypeptide
  MOD_RES (2)..(2): Xaa is Aib
  MOD_RES (20)..(20): Xaa is Aib
  MOD_RES (39)..(39): C-terminal amidation
YXEGTFTSDYSIYLDKQAAXEFVNWLLAGGPSSGAPPPS

SEQ ID NO: 758 - protein, 39 aa, Artificial Sequence
  Synthetic polypeptide
  MOD_RES (2)..(2): Xaa is Aib
  MOD_RES (10)..(10): Acylated with fatty acyl group via dipeptide spacer
  MOD_RES (20)..(20): Xaa is AIB
  MOD_RES (39)..(39): C-terminal amidation
YXEGTFTSDKSIYLDKQAAXEFVNWLLAGGPSSGAPPPS

SEQ ID NO: 759 - protein, 40 aa, Artificial Sequence
  Synthetic polypeptide
  MOD_RES (2)..(2): Xaa is AIB
  MOD_RES (20)..(20): Xaa is AIB
  MOD_RES (24)..(24): Pegylated
  MOD_RES (40)..(40): C-terminal amidation
YXEGTFTSDYSIYLDKQAAXEFVCWLLAGGPSSGAPPPSK

SEQ ID NO: 760 - protein, 40 aa, Artificial Sequence
  Synthetic polypeptide
  MOD_RES (2)..(2): Xaa is AIB
  MOD_RES (20)..(20): Xaa is AIB
  MOD_RES (40)..(40): Pegylated
  MOD_RES (40)..(40): C-terminal amidation
YXEGTFTSDYSIYLDKQAAXEFVNWLLAGGPSSGAPPPSC

SEQ ID NO: 761 - protein, 40 aa, Artificial sequence
  Synthetic polypeptide
  MOD_RES (2)..(2): Xaa is AIB
  MISC_FEATURE (16)..(20): Lactam bridge between side chains of amino acids at positions 16 and 20
  MOD_RES (40)..(40): Pegylated
  MOD_RES (40)..(40): C-terminal amidation
YXEGTFTSDYSIYLDEQAAKEFVNWLLAGGPSSGAPPPSC

SEQ ID NO: 762 - protein, 40 aa, Artificial Sequence; identical to SEQ ID NO: 760
  Synthetic polypeptide
  MOD_RES (2)..(2): Xaa is AIB
  MOD_RES (20)..(20): Xaa is AIB
  MOD_RES (40)..(40): Pegylated
  MOD_RES (40)..(40): C-terminal amidation

SEQ ID NO: 763 - protein, 40 aa, Artificial Sequence; identical to SEQ ID NO: 759
  Synthetic polypeptide
  MOD_RES (2)..(2): Xaa is AIB
  MOD_RES (20)..(20): Xaa is AIB
  MOD_RES (24)..(24): Pegylated
  MOD_RES (40)..(40): C-terminal amidation

SEQ ID NO: 764 - protein, 40 aa, Artificial Sequence; identical to SEQ ID NO: 756
  Synthetic polypeptide
  MOD_RES (2)..(2): Xaa is AIB
  MOD_RES (20)..(20): Xaa is AIB
  MOD_RES (40)..(40): Acylated with fatty acyl group
  MOD_RES (40)..(40): C-terminal amidation

SEQ ID NO: 765 - protein, 40 aa, Artificial Sequence
  Synthetic polypeptide
  MOD_RES (2)..(2): Xaa is AIB
  MOD_RES (10)..(10): Acylated with fatty acyl group via dipeptide spacer
  MOD_RES (20)..(20): Xaa is AIB
  MOD_RES (40)..(40): C-terminal amidation
YXEGTFTSDKSIYLDKQAAXEFVNWLLAGGPSSGAPPPSK

SEQ ID NO: 766 - protein, 40 aa, Artificial Sequence
  Synthetic polypeptide
  MOD_RES (2)..(2): Xaa is AIB
  MOD_RES (20)..(20): Xaa is AIB
  MOD_RES (24)..(24): Pegylated
  MOD_RES (40)..(40): C-terminal amidation
YXQGTFTSDYSIYLDKQAAXEFVCWLLAGGPSSGAPPPSK

SEQ ID NO: 767 - protein, 29 aa, Artificial Sequence
  Synthetic peptide
  MOD_RES (3)..(3): Xaa is Acetyldiaminobutanoic acid
  MOD_RES (16)..(16): Xaa is AIB
  MOD_RES (29)..(29): C-terminal amidation
HSXGTFTSDYSKYLDXRRAADFVAWLLDE

SEQ ID NO: 768 - protein, 29 aa, Artificial Sequence
  Synthetic peptide
  MOD_RES (3)..(3): Xaa is Acetyldiaminobutanoic acid
  MOD_RES (16)..(16): Xaa is AIB
  MOD_RES (29)..(29): C-terminal amidation
HSXGTFTSDYSKYLDXERAADFVAWLLDE

SEQ ID NO: 769 - protein, 31 aa, Artificial Sequence
  Synthetic peptide
  MOD_RES (1)..(1): Xaa is AIB, d-Lys, d-Cys, d-Ala
  MOD_RES (2)..(2): Xaa is Gly(N-Hexyl), Gly(N-Methyl), Phe(N-Methyl)
  MOD_RES (4)..(4): Xaa is AIB
  MOD_RES (26)..(26): Pegylated
  MOD_RES (31)..(31): C-terminal amidation
XXHXEGTFTSDYSKYLDEQAAKEFICWLMNT

SEQ ID NO: 770 - protein, 31 aa, Artificial Sequence
  Synthetic peptide
  MOD_RES (1)..(1): Xaa is AIB, d-Lys, d-Cys, d-Ala
  MOD_RES (2)..(2): Xaa is Gly(N-Hexyl), Gly(N-Methyl), Phe(N-Methyl)
  MOD_RES (4)..(4): Xaa is AIB
  MOD_RES (12)..(12): Acylated with fatty acyl group
  MOD_RES (18)..(18): Xaa is AIB
  MOD_RES (31)..(31): C-terminal amidation
XXHXQGTFTSDKSKYLDXRAAQDFVQWLMDT

SEQ ID NO: 771 - protein, 42 aa, Artificial Sequence
  Synthetic peptide
  MOD_RES (1)..(1): Xaa is AIB, d-Lys, d-Cys, d-Ala
  MOD_RES (2)..(2): Xaa is Gly(N-Hexyl), Gly(N-Methyl), Phe(N-Methyl)
  MOD_RES (4)..(4): Xaa is AIB
  MOD_RES (42)..(42): C-terminal amidation
XXHXEGTFTSDVSSYLEEQAAKEFIAWLVKGGPSSGAPPPSK

SEQ ID NO: 772 - protein, 31 aa, Artificial Sequence
  Synthetic peptide
  MOD_RES (1)..(1): Xaa is AIB, d-Lys, d-Cys, d-Ala
  MOD_RES (2)..(2): Xaa is Gly(N-Hexyl), Gly(N-Methyl), Phe(N-Methyl)
  MOD_RES (4)..(4): d-Ser
  MISC_FEATURE (18)..(22): Lactam ring between side chains of amino acids at positions 18 and 22
  MOD_RES (26)..(26): Pegylated
  MOD_RES (31)..(31): C-terminal amidation
XXHSQGTFTSDYSLYLDERAAKDFVCWLLDT

SEQ ID NO: 773 - protein, 31 aa, Artificial Sequence
  Synthetic peptide
  MOD_RES (1)..(1): Xaa is AIB, d-Lys, d-Cys, d-Ala
  MOD_RES (2)..(2): Xaa is Gly(N-Hexyl), Gly(N-Methyl), Phe(N-Methyl)
  MOD_RES (4)..(4): Xaa is AIB
  MOD_RES (18)..(18): Xaa is AIB
  MOD_RES (22)..(22): Xaa is AIB
  MOD_RES (26)..(26): Pegylated
  MOD_RES (31)..(31): C-terminal amidation
XXHXQGTFTSDYSKYLDXKRAXEFVCWLLDT

SEQ ID NO: 774 - protein, 31 aa, Artificial Sequence; identical to SEQ ID NO: 770
  Synthetic peptide
  MOD_RES (1)..(1): Xaa is AIB, d-Lys, d-Cys, d-Ala
  MOD_RES (2)..(2): Xaa is Gly(N-Hexyl), Gly(N-Methyl), Phe(N-Methyl)
  MOD_RES (4)..(4): Xaa is AIB
  MOD_RES (12)..(12): Acylated with fatty acyl group via dipeptide spacer
  MOD_RES (18)..(18): Xaa is AIB
  MOD_RES (31)..(31): C-terminal amidation

SEQ ID NO: 775 - protein, 31 aa, Artificial Sequence; identical to SEQ ID NO: 770
  Synthetic peptide
  MOD_RES (1)..(1): Xaa is AIB, d-Cys, d-Lys, d-Ala
  MOD_RES (2)..(2): Xaa is Gly(N-Hexyl), Gly(N-Methyl), Phe(N-Methyl)
  MOD_RES (4)..(4): Xaa is AIB
  MOD_RES (12)..(12): Acylated with fatty acyl group via acidic amino acid spacer
  MOD_RES (18)..(18): Xaa is AIB
  MOD_RES (31)..(31): C-terminal amidation

SEQ ID NO: 776 - protein, 31 aa, Artificial Sequence
  Synthetic peptide
  MOD_RES (1)..(1): Xaa is AIB, d-Lys, d-Cys, d-Ala
  MOD_RES (2)..(2): Xaa is Gly(N-Hexyl), Gly(N-Methyl), Phe(N-Methyl)
  MOD_RES (4)..(4): d-Ser
  MOD_RES (12)..(12): Acylated with fatty acyl group via dipeptide spacer
  MOD_RES (18)..(18): Xaa is AIB
  MOD_RES (31)..(31): C-terminal amidation
XXHSQGTFTSDKSKYLDXRAAQDFVQWLMDT

SEQ ID NO: 777 - protein, 31 aa, Artificial Sequence
  Synthetic peptide
  MOD_RES (1)..(1): Xaa is AIB, d-Lys, d-Cys, d-Ala
  MOD_RES (2)..(2): Xaa is Gly(N-Hexyl), Gly(N-Methyl), Phe(N-Methyl)
  MOD_RES (4)..(4): Xaa is AIB
  MOD_RES (12)..(12): Acylated with fatty acyl group via dipeptide spacer
  MOD_RES (18)..(18): Xaa is AIB
  MOD_RES (31)..(31): C-terminal amidation
XXHXQGTFTSDKSKYLDXRAAQDFVQWLLDT

SEQ ID NO: 778 - protein, 31 aa, Artificial Sequence
  Synthetic peptide
  MOD_RES (1)..(1): Xaa is AIB, d-Lys, d-Cys, d-Ala
  MOD_RES (2)..(2): Xaa is Gly(N-Hexyl), Gly(N-Methyl), Phe(N-Methyl)
  MOD_RES (4)..(4): Xaa is AIB
  MOD_RES (12)..(12): Acylated with fatty acyl group via dipeptide spacer
  MOD_RES (31)..(31): C-terminal amidation
XXHXQGTFTSDKSKYLDERAAQDFVQWLMDT

SEQ ID NO: 779 - protein, 31 aa, Artificial Sequence
  Synthetic peptide
  MOD_RES (1)..(1): Xaa is AIB, d-Lys, d-Cys, d-Ala
  MOD_RES (2)..(2): Xaa is Gly(N-Hexyl), Gly(N-Methyl), Phe(N-Methyl)
  MOD_RES (4)..(4): Xaa is AIB
  MOD_RES (12)..(12): Acylated with fatty acyl group via dipeptide spacer
  MOD_RES (18)..(18): Xaa is AIB
  MOD_RES (31)..(31): C-terminal amidation
XXHXQGTFTSDKSKYLEXRAAQDFVQWLMDT

SEQ ID NO: 780 - protein, 31 aa, Artificial Sequence
  Synthetic peptide
  MOD_RES (1)..(1): Xaa is AIB, d-Lys, d-Cys, d-Ala
  MOD_RES (2)..(2): Xaa is Gly(N-Hexyl), Gly(N-Methyl), Phe(N-Methyl)
  MOD_RES (4)..(4): d-Ser
  MOD_RES (12)..(12): Acylated with fatty acyl group via acidic amino acid spacer
  MOD_RES (31)..(31): C-terminal amidation
XXHSQGTFTSDKSKYLDERAAQDFVQWLLDT

SEQ ID NO: 781 - protein, 31 aa, Artificial Sequence
  Synthetic peptide
  MOD_RES (1)..(1): Xaa is AIB, d-Lys, d-Cys, d-Ala
  MOD_RES (2)..(2): Xaa is Gly(N-Hexyl), Gly(N-Methyl), Phe(N-Methyl)
  MOD_RES (4)..(4): Xaa is AIB
  MOD_RES (12)..(12): Acylated with fatty acyl group via acidic amino acid spacer
  MOD_RES (31)..(31): C-terminal amidation
XXHXQGTFTSDKSKYLDEQAAKEFIAWLLDT

SEQ ID NO: 782 - protein, 42 aa, Artificial Sequence
  Synthetic polypeptide
  MOD_RES (1)..(1): Xaa is AIB, d-Lys, d-Cys, d-Ala
  MOD_RES (2)..(2): Xaa is Gly(N-Hexyl), Gly(N-Methyl), Phe(N-Methyl)
  MOD_RES (4)..(4): Xaa is Aib
  MOD_RES (22)..(22): Xaa is Aib
  MOD_RES (42)..(42): C-terminal amidation
XXYXEGTFTSDYSIYLDKQAAXEFVNWLLAGGPSSGAPPPSK

SEQ ID NO: 783 - protein, 41 aa, Artificial Sequence
  Synthetic polypeptide
  MOD_RES (1)..(1): Xaa is AIB, d-Lys, d-Cys, d-Ala
  MOD_RES (2)..(2): Xaa is Gly(N-Hexyl), Gly(N-Methyl), Phe(N-Methyl)
  MOD_RES (4)..(4): Xaa is Aib
  MOD_RES (22)..(22): Xaa is Aib
  MOD_RES (41)..(41): C-terminal amidation
XXYXEGTFTSDYSIYLDKQAAXEFVNWLLAGGPSSGAPPPS

SEQ ID NO: 784 - protein, 41 aa, Artificial Sequence
  Synthetic polypeptide
  MOD_RES (1)..(1): Xaa is AIB, d-Lys, d-Cys, d-Ala
  MOD_RES (2)..(2): Xaa is Gly(N-Hexyl), Gly(N-Methyl), Phe(N-Methyl)
  MOD_RES (4)..(4): Xaa is Aib
  MOD_RES (12)..(12): Acylated with fatty acyl group via dipeptide spacer
  MOD_RES (22)..(22): Xaa is AIB
  MOD_RES (41)..(41): C-terminal amidation
XXYXEGTFTSDKSIYLDKQAAXEFVNWLLAGGPSSGAPPPS

SEQ ID NO: 785 - protein, 42 aa, Artificial Sequence
  Synthetic polypeptide
  MOD_RES (1)..(1): Xaa is AIB, d-Lys, d-Cys, d-Ala
  MOD_RES (2)..(2): Xaa is Gly(N-Hexyl), Gly(N-Methyl), Phe(N-Methyl)
  MOD_RES (4)..(4): Xaa is AIB
  MOD_RES (22)..(22): Xaa is AIB
  MOD_RES (26)..(26): Pegylated
  MOD_RES (42)..(42): C-terminal amidation
XXYXEGTFTSDYSIYLDKQAAXEFVCWLLAGGPSSGAPPPSK

SEQ ID NO: 786 - protein, 42 aa, Artificial Sequence
  Synthetic polypeptide
  MOD_RES (1)..(1): Xaa is AIB, d-Lys, d-Cys, d-Ala
  MOD_RES (2)..(2): Xaa is Gly(N-Hexyl), Gly(N-Methyl), Phe(N-Methyl)
  MOD_RES (4)..(4): Xaa is AIB
  MOD_RES (22)..(22): Xaa is AIB
  MOD_RES (42)..(42): Pegylated
  MOD_RES (42)..(42): C-terminal amidation
XXYXEGTFTSDYSIYLDKQAAXEFVNWLLAGGPSSGAPPPSC

SEQ ID NO: 787 - protein, 42 aa, Artificial sequence
  Synthetic polypeptide
  MOD_RES (1)..(1): Xaa is AIB, d-Lys, d-Cys, d-Ala
  MOD_RES (2)..(2): Xaa is Gly(N-Hexyl), Gly(N-Methyl), Phe(N-Methyl)
  MOD_RES (4)..(4): Xaa is AIB
  MISC_FEATURE (18)..(22): Lactam bridge between side chains of amino acids at positions 18 and 22
  MOD_RES (42)..(42): Pegylated
  MOD_RES (42)..(42): C-terminal amidation
XXYXEGTFTSDYSIYLDEQAAKEFVNWLLAGGPSSGAPPPSC

SEQ ID NO: 788 - protein, 42 aa, Artificial Sequence; identical to SEQ ID NO: 786
  Synthetic polypeptide
  MOD_RES (1)..(1): Xaa is AIB, d-Lys, d-Cys, d-Ala
  MOD_RES (2)..(2): Xaa is Gly(N-Hexyl), Gly(N-Methyl), Phe(N-Methyl)
  MOD_RES (4)..(4): Xaa is AIB
  MOD_RES (22)..(22): Xaa is AIB
  MOD_RES (42)..(42): Pegylated
  MOD_RES (42)..(42): C-terminal amidation

SEQ ID NO: 789 - protein, 42 aa, Artificial Sequence; identical to SEQ ID NO: 785
  Synthetic polypeptide
  MOD_RES (1)..(1): Xaa is AIB, d-Lys, d-Cys, d-Ala
  MOD_RES (2)..(2): Xaa is Gly(N-Hexyl), Gly(N-Methyl), Phe(N-Methyl)
  MOD_RES (4)..(4): Xaa is AIB
  MOD_RES (22)..(22): Xaa is AIB
  MOD_RES (26)..(26): Pegylated
  MOD_RES (42)..(42): C-terminal amidation

SEQ ID NO: 790 - protein, 42 aa, Artificial Sequence; identical to SEQ ID NO: 782
  Synthetic polypeptide
  MOD_RES (1)..(1): Xaa is AIB, d-Lys, d-Cys, d-Ala
  MOD_RES (2)..(2): Xaa is Gly(N-Hexyl), Gly(N-Methyl), Phe(N-Methyl)
  MOD_RES (4)..(4): Xaa is AIB
  MOD_RES (22)..(22): Xaa is AIB
  MOD_RES (42)..(42): Acylated with fatty acyl group
  MOD_RES (42)..(42): C-terminal amidation

SEQ ID NO: 791 - protein, 42 aa, Artificial Sequence
  Synthetic polypeptide
  MOD_RES (1)..(1): Xaa is AIB, d-Lys, d-Cys, d-Ala
  MOD_RES (2)..(2): Xaa is Gly(N-Hexyl), Gly(N-Methyl), Phe(N-Methyl)
  MOD_RES (4)..(4): Xaa is AIB
  MOD_RES (12)..(12): Acylated with fatty acyl group via dipeptide spacer
  MOD_RES (22)..(22): Xaa is AIB
  MOD_RES (42)..(42): C-terminal amidation
XXYXEGTFTSDKSIYLDKQAAXEFVNWLLAGGPSSGAPPPSK

SEQ ID NO: 792 - protein, 42 aa, Artificial Sequence
  Synthetic polypeptide
  MOD_RES (1)..(1): Xaa is AIB, d-Lys, d-Cys, d-Ala
  MOD_RES (2)..(2): Xaa is Gly(N-Hexyl), Gly(N-Methyl), Phe(N-Methyl)
  MOD_RES (4)..(4): Xaa is AIB
  MOD_RES (22)..(22): Xaa is AIB
  MOD_RES (26)..(26): Pegylated
  MOD_RES (42)..(42): C-terminal amidation
XXYXQGTFTSDYSIYLDKQAAXEFVCWLLAGGPSSGAPPPSK

SEQ ID NO: 793 - protein, 31 aa, Artificial Sequence
  Synthetic peptide
  MOD_RES (1)..(1): Xaa is AIB, d-Lys, d-Cys, d-Ala
  MOD_RES (2)..(2): Xaa is Gly(N-Hexyl), Gly(N-Methyl), Phe(N-Methyl)
  MOD_RES (5)..(5): Xaa is Acetyldiaminobutanoic acid
  MOD_RES (18)..(18): Xaa is AIB
  MOD_RES (31)..(31): C-terminal amidation
XXHSXGTFTSDYSKYLDXRRAADFVAWLLDE

SEQ ID NO: 794 - protein, 31 aa, Artificial Sequence
  Synthetic peptide
  MOD_RES (1)..(1): Xaa is AIB, d-Lys, d-Cys, d-Ala
  MOD_RES (2)..(2): Xaa is Gly(N-Hexyl), Gly(N-Methyl), Phe(N-Methyl)
  MOD_RES (5)..(5): Xaa is Acetyldiaminobutanoic acid
  MOD_RES (18)..(18): Xaa is AIB
  MOD_RES (31)..(31): C-terminal amidation
XXHSXGTFTSDYSKYLDXERAADFVAWLLDE

SEQ ID NO: 795-800 - skipped (6 entries)

SEQ ID NO: 801 - protein, 29 aa, Homo sapiens
HSQGTFTSDYSKYLDSRRAQDFVQWLMNT

SEQ ID NO: 802 - protein, 29 aa, Artificial Sequence
  Glucagon analogue
  MOD_RES (16)..(16): Xaa is Ser, Cys, Orn, homocysteine or acetyl phenyalanine
  MOD_RES (27)..(27): Xaa is Met, Leu or Nle
HSQGTFTSDYSKYLDXRRAQDFVQWLXDT

SEQ ID NO: 803 - protein, 29 aa, Artificial Sequence
  Glucagon analogue
  MOD_RES (17)..(17): Xaa is Arg, Cys, Orn, homocysteine or acetyl phenyalanine
  MOD_RES (27)..(27): Xaa is Met, Leu or Nle
HSQGTFTSDYSKYLDSXRAQDFVQWLXDT

SEQ ID NO: 804 - protein, 29 aa, Artificial Sequence
  Glucagon analogue
  MOD_RES (21)..(21): Xaa is Asp, Cys, Orn, homocysteine or acetyl phenylalanine
  MOD_RES (27)..(27): Xaa is Met, Leu or Nle
HSQGTFTSDYSKYLDSRRAQXFVQWLXDT

SEQ ID NO: 805 - protein, 29 aa, Artificial Sequence
  Synthetic peptide
  MOD_RES (24)..(24): Xaa is Gln, Cys, Orn, homocysteine or acetyl phenylalanine
  MOD_RES (27)..(27): Xaa is Met, Leu or Nle
HSQGTFTSDYSKYLDSRRAQDFVXWLXDT

SEQ ID NO: 806 - protein, 29 aa, Artificial Sequence
  Glucagon analogue
  MOD_RES (21)..(21): Xaa is Asp, Cys, Orn, homocysteine or acetyl phenyalanine
  MOD_RES (24)..(24): Xaa is Gln, Cys, Orn, homocysteine or acetyl phenyalanine
  MOD_RES (27)..(27): Xaa is Met, Leu or Nle
HSQGTFTSDYSKYLDSRRAQXFVXWLXDT

SEQ ID NO: 807 - protein, 29 aa, Artificial Sequence
  Glucagon analogue
  MOD_RES (27)..(27): Xaa is Met, Leu or Nle
  MOD_RES (28)..(28): Xaa is Lys, Arg, His, Asp, Glu, cysteic acid or homocysteic acid
  MOD_RES (29)..(29): Xaa is Thr, Lys, Arg, His, Asp, Glu, cysteic acid or homocysteic acid
HSQGTFTSDYSKYLDSRRAQDFVQWLXXX

SEQ ID NO: 808 - protein, 29 aa, Artificial Sequence
  Glucagon analogue
  MOD_RES (27)..(27): Xaa is Met, Leu or Nle
  MOD_RES (28)..(28): Xaa is Asp or Glu
  MOD_RES (29)..(29): Xaa is Thr, Asp or Glu
HSQGTFTSDYSKYLDSRRAQDFVQWLXXX

SEQ ID NO: 809 - protein, 29 aa, Artificial Sequence
  Glucagon analogue
  MOD_RES (27)..(27): Xaa is Met, Leu or Nle
  MOD_RES (29)..(29): Xaa is Asp or Glu
HSQGTFTSDYSKYLDSRRAQDFVQWLXNX

SEQ ID NO: 810 - protein, 29 aa, Artificial Sequence
  Synthetic peptide
  MOD_RES (27)..(27): Xaa is Met, Leu or Nle
HSQGTFTSDYSKYLDSRRAQDFVQWLXDT

SEQ ID NO: 811 - protein, 29 aa, Artificial Sequence
  Glucagon analogue
HSQGTFTSDYSKYLDSRRAQDFVQWLMDT

SEQ ID NO: 812 - protein, 29 aa, Artificial Sequence
  Glucagon analogue
  MOD_RES (29)..(29): Xaa is Lys, Arg or His
HSQGTFTSDYSKYLDSRRAQDFVQWLMNX

SEQ ID NO: 813 - protein, 29 aa, Artificial Sequence
  Glucagon analogue
HSQGTFTSDYSKYLESRRAQDFVQWLMDT

SEQ ID NO: 814 - protein, 29 aa, Artificial Sequence
  Synthetic peptide
  MOD_RES (16)..(16): Pegylation
  MOD_RES (27)..(27): Xaa is Met, Leu or Nle
HSQGTFTSDYSKYLDCRRAQDFVQWLXDT

SEQ ID NO: 815 - protein, 29 aa, Artificial Sequence
  Glucagon analogue
  MOD_RES (17)..(17): Pegylation
  MOD_RES (27)..(27): Xaa is Met, Leu or Nle
HSQGTFTSDYSKYLDSCRAQDFVQWLXDT

SEQ ID NO: 816 - protein, 29 aa, Artificial Sequence
  Glucagon analogue
  MOD_RES (21)..(21): Pegylation
  MOD_RES (27)..(27): Xaa is Met, Leu or Nle
HSQGTFTSDYSKYLDSRRAQCFVQWLXDT

SEQ ID NO: 817 - protein, 29 aa, Artificial Sequence
  Glucagon analogue
  MOD_RES (24)..(24): Pegylation
  MOD_RES (27)..(27): Xaa is Met, Leu or Nle
HSQGTFTSDYSKYLDSRRAQDFVCWLXDT

SEQ ID NO: 818 - protein, 29 aa, Artificial Sequence
  Glucagon analogue
  MOD_RES (21)..(21): Pegylation
  MOD_RES (27)..(27): Xaa is Met, Leu or Nle
HSQGTFTSDYSRYLDSRRAQKFVQWLXDT

SEQ ID NO: 819 - protein, 29 aa, Artificial Sequence
  Glucagon analogue
  MOD_RES (24)..(24): Pegylation
  MOD_RES (27)..(27): Xaa is Met, Leu or Nle
HSQGTFTSDYSRYLDSRRAQDFVKWLXDT

SEQ ID NO: 820 - protein, 10 aa, Artificial Sequence
  Synthetic peptide
  MISC_FEATURE: Peptide fragment representing carboxy terminal 10 amino acids of Exendin-4
GPSSGAPPPS

SEQ ID NO: 821 - protein, 8 aa, Artificial Sequence
  Synthetic peptide
  MISC_FEATURE: Peptide fragment representing the carboxy terminal 8 amino acids of oxyntomodulin
KRNRNNIA

SEQ ID NO: 822 - protein, 4 aa, Artificial Sequence
  Synthetic peptide
  MISC_FEATURE: Peptide fragment representing the amino 4 amino acids of oxyntomodulin carboxy terminus of SEQ ID NO: 21
KRNR

SEQ ID NO: 823 - protein, 10 aa, Artificial Sequence
  Synthetic peptide
  MISC_FEATURE: Peptide fragment representing the carboxy terminal 10 amino acids of Exendin-4
  MOD_RES (10)..(10): AMIDATION
GPSSGAPPPS

SEQ ID NO: 824 - protein, 39 aa, Artificial Sequence
  Glucagon analogue
HSQGTFTSDYSKYLDSRRAQDFVQWLMDTGPSSGAPPPS

SEQ ID NO: 825 - protein, 37 aa, Artificial Sequence; identical to SEQ ID NO: 706
  Glucagon analogue

SEQ ID NO: 826 - protein, 33 aa, Artificial Sequence
  Glucagon analogue
HSQGTFTSDYSKYLDSRRAQDFVQWLMDTKRNR

SEQ ID NO: 827 - protein, 29 aa, Artificial Sequence
  Glucagon analogue
HSQGTFTSDYSKYLDSCRAQDFVQWLMNT

SEQ ID NO: 828 - protein, 39 aa, Artificial Sequence; identical to SEQ ID NO: 36
  Synthetic peptide

SEQ ID NO: 829 - protein, 29 aa, Artificial Sequence
  Glucagon analogue
  MOD_RES (24)..(24): 2-butyrolactone bound through Cys thiol group
HSQGTFTSDYSKYLDSRRAQDFVQWLMNT

SEQ ID NO: 830 - protein, 29 aa, Artificial Sequence
  Glucagon analogue
  MOD_RES (24)..(24): Carboxymethyl group bound through Cys thiol group
HSQGTFTSDYSKYLDSRRAQDFVQWLMNT

SEQ ID NO: 831 - protein, 39 aa, Artificial Sequence; identical to SEQ ID NO: 36
  Glucagon analogue

SEQ ID NO: 832 - protein, 30 aa, Artificial Sequence
  Glucagon analog
  MOD_RES (30)..(30): Xaa is Asp, Glu, Lys, Arg or His
HSQGTFTSDYSKYLDSRRAQDFVQWLMDTX

SEQ ID NO: 833 - protein, 29 aa, Artificial Sequence
  Glucagon analogue
  MOD_RES (15)..(15): Xaa is Asp, Glu, cysteic acid, homoglutamic acid or homocysteic acid
  MOD_RES (27)..(27): Xaa is Met, Leu or Nle
  MOD_RES (28)..(28): Xaa is Asn, Lys, Arg, His, Asp or Glu
  MOD_RES (29)..(29): Xaa is Thr, Lys, Arg, His, Asp or Glu
HSQGTFTSDYSKYLXSRRAQDFVQWLXXX

SEQ ID NO: 834 - protein, 29 aa, Artificial Sequence
  Glucagon analogue
  MOD_RES (15)..(15): Xaa is Asp, Glu, cysteic acid, homoglutamic acid or homocysteic acid
  MOD_RES (27)..(27): Xaa is Met, Leu or Nle
  MOD_RES (28)..(28): Xaa is Asn or an acidic amino acid
  MOD_RES (29)..(29): Xaa is Thr or an acidic amino acid
HSQGTFTSDYSKYLXSRRAQDFVQWLXXX

SEQ ID NO: 835 - protein, 39 aa, Artificial Sequence
  Synthetic peptide
HSQGTFTSDYSKYLDSRRAQDFVQWLMETGPSSGAPPPS

SEQ ID NO: 836 - protein, 37 aa, Artificial Sequence
  Glucagon analogue
HSQGTFTSDYSKYLDSRRAQDFVQWLMETKRNRNNIA

SEQ ID NO: 837 - protein, 33 aa, Artificial Sequence
  Glucagon analogue
HSQGTFTSDYSKYLDSRRAQDFVQWLMETKRNR

SEQ ID NO: 838 - protein, 29 aa, Artificial Sequence
  Glucagon analogue
HSQGTFTSDYSKYLDSRRAQDFVQWLMET

SEQ ID NO: 839 - protein, 27 aa, Artificial Sequence
  Synthetic peptide
  MOD_RES (1)..(1): Xaa is any amino acid
  MOD_RES (2)..(2): Xaa is any amino acid
  MOD_RES (27)..(27): Met comprises Z
XXQGTFTSDYSKYLDSRRAQDFVQWLM

SEQ ID NO: 840 - protein, 29 aa, Artificial Sequence
  Synthetic peptide
  MOD_RES (1)..(1): Xaa is alpha, alpha-dimethyl imidiazole acetic acid (DMIA)
  MISC_FEATURE (16)..(20): Lactam bridge between residues 16 and 20
  MOD_RES (24)..(24): Pegylation
XSQGTFTSDYSKYLDERRAKDFVCWLMNT

SEQ ID NO: 841 - protein, 29 aa, Artificial Sequence
  Synthetic peptide
  MOD_RES (1)..(1): Xaa is alpha, alpha-dimethyl imidiazole acetic acid (DMIA)
  MISC_FEATURE (16)..(20): Lactam bridge between residues 16 and 20
  MOD_RES (24)..(24): Glutamine to alanine mutation
  MOD_RES (29)..(29): Pegylation
XSQGTFTSDYSKYLDERRAKDFVAWLMNC

SEQ ID NO: 842 - protein, 29 aa, Artificial Sequence
  Synthetic peptide
  MOD_RES (1)..(1): Xaa is alpha, alpha-dimethyl imidiazole acetic acid (DMIA)
  MISC_FEATURE (16)..(20): Lactam bridge between residues 16 and 20
  MOD_RES (24)..(24): Pegylation
  MOD_RES (27)..(27): Xaa is Nle or Leu
XSQGTFTSDYSKYLDERRAKDFVCWLXNT

SEQ ID NO: 843 - protein, 29 aa, Artificial Sequence
  Synthetic peptide
  MOD_RES (1)..(1): Xaa is alpha, alpha-dimethyl imidiazole acetic acid (DMIA)
  MISC_FEATURE (16)..(20): Lactam bridge between residues 16 and 20
  MISC_FEATURE (24)..(24): Glutamine to alanine mutation
  MISC_FEATURE (27)..(27): Xaa is Nle or Leu
  MOD_RES (29)..(29): Pegylation
XSQGTFTSDYSKYLDERRAKDFVAWLXNC

SEQ ID NO: 844 - protein, 29 aa, Artificial Sequence
  Synthetic peptide
  MISC_FEATURE: SEQ ID NO: 1 with  Ala 20, Ala 24, Nle 27, and Asp 28
  MOD_RES (27)..(27): Xaa is Nle
HSQGTFTSDYSKYLDSRRAADFVAWLXDT

SEQ ID NO: 845 - protein, 29 aa, Artificial Sequence
  Synthetic peptide
  MISC_FEATURE: SEQ ID NO: 1 with Ala 20, Ala 24, Nle27 , Asp 28, and Glu 29
  MOD_RES (27)..(27): Xaa is Nle
HSQGTFTSDYSKYLDSRRAADFVAWLXDE

SEQ ID NO: 846 - protein, 30 aa, Artificial Sequence
  Synthetic peptide
  MISC_FEATURE: SEQ ID NO: 1 with Ala 20, Ala 24, Nle 27, Asp 28, and Glu 30
  MOD_RES (27)..(27): Xaa is Nle
HSQGTFTSDYSKYLDSRRAADFVAWLXDTE

SEQ ID NO: 847 - protein, 29 aa, Artificial Sequence
  Synthetic peptide
  MISC_FEATURE: SEQ ID NO: 1 with Ala 20, Ala 24, Nle 27, Glu 28, and Glu 29
  MOD_RES (27)..(27): Xaa is Nle
HSQGTFTSDYSKYLDSRRAADFVAWLXEE

SEQ ID NO: 848 - protein, 30 aa, Artificial Sequence
  Synthetic peptide
  MISC_FEATURE: SEQ ID NO: 1 with Ala 20, Ala 24, Nle 27, Glu 28, and Glu 30
  MOD_RES (27)..(27): Xaa is Nle
HSQGTFTSDYSKYLDSRRAADFVAWLXETE

SEQ ID NO: 849 - protein, 30 aa, Artificial Sequence
  Synthetic peptide
  MOD_RES (27)..(27): Xaa is Nle
  MISC_FEATURE (27)..(27): SEQ ID NO: 1 with Ala 20, Ala 24, Nle 27, Glu 29, and Glu 30
HSQGTFTSDYSKYLDSRRAADFVAWLXNEE

SEQ ID NO: 850 - protein, 29 aa, Artificial Sequence
  Synthetic peptide
  MISC_FEATURE: SEQ ID NO: 1 with Ala 20, Glu 21, Ala 24, Nle 27, and Asp 28
  MOD_RES (27)..(27): Xaa is Nle
HSQGTFTSDYSKYLDSRRAAEFVAWLXDT

SEQ ID NO: 851 - protein, 29 aa, Artificial Sequence
  Synthetic peptide
  MISC_FEATURE: SEQ ID NO: 1 with Ala 20, Glu 21, Ala 24, Nle 27, Asp 28, and Glu 29
  MOD_RES (27)..(27): Xaa is Nle
HSQGTFTSDYSKYLDSRRAAEFVAWLXDE

SEQ ID NO: 852 - protein, 29 aa, Artificial Sequence
  Synthetic peptide
  MISC_FEATURE: SEQ ID NO: 1 with Ala 20, Glu 21, Ala 24, Nle 27, Asp 28, and Glu 30
  MOD_RES (27)..(27): Xaa is Nle
HSQGTFTSDYSKYLDSRRAAEFVAWLXDE

SEQ ID NO: 853 - protein, 29 aa, Artificial Sequence
  Synthetic peptide
  MISC_FEATURE: SEQ ID NO :1 with Ala 20, Glu 21, Ala 24, Nle 27, Glu 28, and Glu 29
  MOD_RES (27)..(27): Xaa is Nle
HSQGTFTSDYSKYLDSRRAAEFVAWLXEE

SEQ ID NO: 854 - protein, 29 aa, Artificial Sequence
  Synthetic peptide
  MISC_FEATURE: SEQ ID NO: 1 with Ala 20, Glu 21, Ala 24, Nle 27, Glu 28, and Glu 30
HSQGTFTSDYSKYLDSRRAQDFVQWLMNT

SEQ ID NO: 855 - protein, 30 aa, Artificial Sequence
  Synthetic peptide
  MISC_FEATURE: SEQ ID NO: 1 with Ala 20, Glu 21, Ala 24, Nle 27, Glu 29, and Glu 30
  MOD_RES (27)..(27): Xaa is Nle
HSQGTFTSDYSKYLDSRRAAEFVAWLXNEE

SEQ ID NO: 856 - protein, 29 aa, Artificial Sequence
  Synthetic peptide
  MISC_FEATURE: SEQ ID NO: 1 with Thr 16, Ala 20, Glu 21, Ala 24, Nle 27, Asp 28, and Glu29
  MOD_RES (27)..(27): Xaa is Nle
HSQGTFTSDYSKYLDTRRAAEFVAWLXDE

SEQ ID NO: 857 - protein, 31 aa, Homo sapiens; identical to SEQ ID NO: 50

SEQ ID NO: 858 - protein, 30 aa, Homo sapiens; identical to SEQ ID NO: 52
  MOD_RES (30)..(30): AMIDATION

SEQ ID NO: 859 - protein, 29 aa, Artificial Sequence
  Synthetic peptide
  MOD_RES (3)..(3): Xaa is Glutamine analog
  MOD_RES (27)..(27): Xaa is Nle
HSXGTFTSDYSKYLDTRRAAEFVAWLXDE

SEQ ID NO: 860 - protein, 29 aa, Artificial Sequence
  Synthetic peptide
  MOD_RES (3)..(3): Xaa is Glutamine analog
  MOD_RES (16)..(16): Xaa is Aminoisobutryic acid
HSXGTFTSDYSKYLDXRRAADFVAWLMDE

SEQ ID NO: 861 - protein, 29 aa, Artificial Sequence
  Synthetic peptide
  MOD_RES (27)..(27): Xaa is Nle
HSQGTFTSDYSKYLDTRRAAEFVAWLXDE

SEQ ID NO: 862 - protein, 29 aa, Artificial Sequence
  Synthetic peptide
  MOD_RES (3)..(3): Xaa is Acetamidomethyl-cysteine
  MOD_RES (27)..(27): Xaa is Nle
HSXGTFTSDYSKYLDTRRAAEFVAWLXDE

SEQ ID NO: 863 - protein, 29 aa, Artificial Sequence
  Synethic peptide
  MOD_RES (3)..(3): Xaa is Acetyldiaminobutanoic acid
  MOD_RES (27)..(27): Xaa is Nle
HSXGTFTSDYSKYLDTRRAAEFVAWLXDE

SEQ ID NO: 864 - protein, 29 aa, Artificial Sequence
  Synthetic peptide
  MOD_RES (3)..(3): Xaa is Carbamoyldiaminopropanoic acid
  MOD_RES (27)..(27): Xaa is Nle
HSXGTFTSDYSKYLDTRRAAEFVAWLXDE

SEQ ID NO: 865 - protein, 29 aa, Artificial Sequence
  Synthetic peptide
  MOD_RES (3)..(3): Xaa is Methylglutamine
  MOD_RES (27)..(27): Xaa is Nle
HSXGTFTSDYSKYLDTRRAAEFVAWLXDE

SEQ ID NO: 866 - protein, 29 aa, Artificial Sequence
  Synthetic peptide
  MOD_RES (3)..(3): Xaa is Methionine sulfoxide
  MOD_RES (27)..(27): Xaa is Nle
HSXGTFTSDYSKYLDTRRAAEFVAWLXDE

SEQ ID NO: 867 - protein, 29 aa, Artificial Sequence
  Synthetic peptide
  MOD_RES (3)..(3): Xaa is Acetylornithine
  MOD_RES (27)..(27): Xaa is Nle
HSXGTFTSDYSKYLDTRRAAEFVAWLXDE

SEQ ID NO: 868 - protein, 29 aa, Artificial Sequence
  Synthetic peptide
  MOD_RES (16)..(16): Xaa is Aminoisobutryic acid
HSQGTFTSDYSKYLDXRRAADFVAWLMDE

SEQ ID NO: 869 - protein, 29 aa, Artificial Sequence
  Synthetic peptide
  MOD_RES (3)..(3): Xaa is Acetyldiaminobutanoic acid
  MOD_RES (16)..(16): Xaa is Aminoisobutryic acid
HSXGTFTSDYSKYLDXRRAADFVAWLMDE

SEQ ID NO: 870 - protein, 29 aa, Artificial Sequence
  Synthetic peptide
  MOD_RES (3)..(3): Xaa is Methylglutamine
  MOD_RES (16)..(16): Xaa is Aib
HSXGTFTSDYSKYLDXRRAADFVAWLMDE

SEQ ID NO: 871 - protein, 29 aa, Artificial Sequence
  Synthetic peptide
  MOD_RES (3)..(3): Xaa is acetyldiaminobutanoic acid
  MOD_RES (16)..(16): Xaa is Aib
HSXGTFTSDYSKYLDXRRAADFVAWLLDE

SEQ ID NO: 872 - protein, 39 aa, Artificial Sequence; identical to SEQ ID NO: 604
  Synthetic peptide
  MOD_RES (3)..(3): Xaa is Acetyldiaminobutanoic acid
  MOD_RES (16)..(16): Aminoisobutryic Acid
  MOD_RES (39)..(39): AMIDATION

SEQ ID NO: 873 - protein, 29 aa, Artificial Sequence
  Synthetic peptide
  MOD_RES (3)..(3): Xaa is Acetyldiaminobutanoic acid
  MOD_RES (16)..(16): Xaa is Aminoisobutryric acid
HSXGTFTSDYSKYLDXRRASDFVSWLLDE

SEQ ID NO: 874 - protein, 29 aa, Artificial Sequence
  Synthetic peptide
  MOD_RES (3)..(3): Xaa is Acetyldiaminobutanoic acid
  MOD_RES (16)..(16): Xaa is Aminoisobutryic acid
HSXGTFTSDYSKYLDXRRATDFVTWLLDE

SEQ ID NO: 875 - protein, 29 aa, Artificial Sequence
  Synthetic peptide
HSQGTFTSDYSKYLDSRRAQDFVQWLMDE

SEQ ID NO: 876 - protein, 29 aa, Artificial Sequence
  Synthetic peptide
  MOD_RES (16)..(16): Xaa is Aib
HSQGTFTSDYSKYLDXRRAQDFVQWLMDE

SEQ ID NO: 877 - protein, 29 aa, Artificial Sequence
  Synthetic peptide
  misc_feature (3)..(3): Xaa can be any naturally occurring amino acid
HSXGTFTSDYSKYLDSRRAQDFVQWLMNT

SEQ ID NO: 878 - protein, 29 aa, Artificial Sequence
  Synthetic peptide
HSQGTFTSDYSKYLDSRRAQDFVQWLMDT

SEQ ID NO: 879 - protein, 30 aa, Artificial Sequence; identical to SEQ ID NO: 581
  Synthetic peptide
  MOD_RES (2)..(2): Xaa is d-Ser
  MOD_RES (30)..(30): Acylated with a C14 fatty acyl group
  MOD_RES (30)..(30): AMIDATION

SEQ ID NO: 880 - protein, 29 aa, Artificial Sequence
  Synthetic peptide
  MOD_RES (2)..(2): Xaa is d-Ser
  MOD_RES (10)..(10): Acylated with a C14 fatty acyl group
  MOD_RES (29)..(29): AMIDATION
HXQGTFTSDKSKYLDERRAKDFVQWLMNT

SEQ ID NO: 881 - protein, 30 aa, Artificial Sequence; identical to SEQ ID NO: 581
  Synthetic peptide
  MOD_RES (2)..(2): Xaa is d-Ser
  MOD_RES (30)..(30): Acylated with a C16 fatty acyl group
  MOD_RES (30)..(30): AMIDATION

SEQ ID NO: 882 - protein, 29 aa, Artificial Sequence
  Synthetic peptide
  MOD_RES (2)..(2): Xaa is d-Ser
  MOD_RES (10)..(10): Acylated with a C16 fatty acyl group
  MOD_RES (29)..(29): AMIDATION
HXQGTFTSDKSKYLDERRAKDFVQWLMNT

SEQ ID NO: 883 - protein, 29 aa, Artificial Sequence
  Synthetic peptide
  MOD_RES (2)..(2): Aminoisobutryic Acid
  MOD_RES (10)..(10): Acylated with a C18 fatty acyl group
  MOD_RES (24)..(24): Cys-PEG
  MOD_RES (29)..(29): AMIDATION
HXQGTFTSDKSKYLDEQAAKEFICWLMNT

SEQ ID NO: 884 - protein, 30 aa, Artificial Sequence; identical to SEQ ID NO: 586
  Synthetic peptide
  MOD_RES (2)..(2): Aminoisobutryic Acid
  MOD_RES (24)..(24): Cys-PEG
  MOD_RES (30)..(30): Acylated with a C18 fatty acyl group
  MOD_RES (30)..(30): AMIDATION

SEQ ID NO: 885 - protein, 29 aa, Artificial sequence
  Synthetic peptide
  MOD_RES (16)..(16): Xaa is Ser or alpha, alpha-disubstituted amino acid
  MOD_RES (20)..(20): Xaa is Gln or alpha, alpha-disubstituted amino acid
  MOD_RES (21)..(21): Xaa is Asp or alpha, alpha-disubstituted amino acid
  MOD_RES (24)..(24): Xaa is Gln or alpha, alpha-disubstituted amino acid
HSQGTFTSDYSKYLDXRRAXXFVXWLMNT

SEQ ID NO: 886 - protein, 29 aa, Artificial Sequence
  Synthetic peptide
  MOD_RES (16)..(16): Xaa is Aib
HSQGTFTSDYSKYLDXRRAQDFVQWLMNT

SEQ ID NO: 887 - protein, 29 aa, Artificial Sequence
  Synthetic peptide
  MOD_RES (19)..(19): Xaa is Aib
HSQGTFTSDYSKYLDSRRXQDFVQWLMNT

SEQ ID NO: 888 - protein, 29 aa, Artificial Sequence
  Synthetic peptide
  MOD_RES (20)..(20): Xaa is Aib
HSQGTFTSDYSKYLDSRRAXDFVQWLMNT

SEQ ID NO: 889 - protein, 29 aa, Artificial Sequence
  Synthetic peptide
  MOD_RES (21)..(21): Xaa is Aib
HSQGTFTSDYSKYLDSRRAQXFVQWLMNT

SEQ ID NO: 890 - protein, 29 aa, Artificial Sequence
  Synthetic peptide
  MOD_RES (24)..(24): Xaa is Aib
HSQGTFTSDYSKYLDSRRAQDFVXWLMNT

SEQ ID NO: 891 - protein, 29 aa, Artificial Sequence
  Synthetic peptide
  MOD_RES (16)..(16): Xaa is Aib
  MOD_RES (20)..(20): Xaa is Aib
HSQGTFTSDYSKYLDXRRAXDFVQWLMNT

SEQ ID NO: 892 - protein, 29 aa, Artificial Sequence
  Synthetic peptide
  MOD_RES (16)..(16): Xaa is Aib
  MOD_RES (24)..(24): Xaa is Aib
HSQGTFTSDYSKYLDXRRAQDFVXWLMNT

SEQ ID NO: 893 - protein, 29 aa, Artificial Sequence
  Synthetic peptide
  MOD_RES (20)..(20): Xaa is Aib
  MOD_RES (24)..(24): Xaa is Aib
HSQGTFTSDYSKYLDSRRAXDFVXWLMNT

SEQ ID NO: 894 - protein, 29 aa, Artificial Sequence
  Synthetic peptide
  MOD_RES (16)..(16): Xaa is Aib
  MOD_RES (20)..(20): Xaa is Aib
  MOD_RES (24)..(24): Xaa is Aib
HSQGTFTSDYSKYLDXRRAXDFVXWLMNT

SEQ ID NO: 895 - protein, 29 aa, Artificial Sequence
  Synthetic peptide
  MOD_RES (2)..(2): Xaa is Aib
  MOD_RES (16)..(16): Xaa is Aib
  MOD_RES (29)..(29): AMIDATION
HXQGTFTSDKSKYLDXRRAQDFVQWLMNT

SEQ ID NO: 896 - protein, 29 aa, Artificial Sequence
  Synthetic peptide
  MOD_RES (2)..(2): Xaa is Aib
  MOD_RES (16)..(16): Xaa is Aib
  MOD_RES (29)..(29): AMIDATION
HXQGTFTSDYSKYLDXRRAQDFVQWLMNT

SEQ ID NO: 897 - protein, 29 aa, Artificial Sequence
  Synthetic peptide
  MOD_RES (2)..(2): Xaa is Aib
  MOD_RES (10)..(10): Acylated with a C16 fatty acyl group
  MOD_RES (16)..(16): Xaa is Aib
  MOD_RES (29)..(29): AMIDATION
HXQGTFTSDKSKYLDXRRAQDFVQWLMNT

SEQ ID NO: 898 - protein, 29 aa, Artificial Sequence
  Synthetic peptide
  MOD_RES (2)..(2): Xaa is Aib
  MOD_RES (10)..(10): Acylated with a C16 fatty acyl group via Ala-Ala spacer
  MOD_RES (16)..(16): Xaa is Aib
  MOD_RES (29)..(29): AMIDATION
HXQGTFTSDKSKYLDXRRAQDFVQWLMNT

SEQ ID NO: 899 - protein, 29 aa, Artificial Sequence
  Synthetic peptide
  MOD_RES (2)..(2): Xaa is Aib
  MOD_RES (10)..(10): Acylated with a C16 fatty acyl group via dipeptide spacer
  MOD_RES (16)..(16): Xaa is Aib
  MOD_RES (29)..(29): AMIDATION
HXQGTFTSDKSKYLDXRRAQDFVQWLMNT

SEQ ID NO: 900 - protein, 29 aa, Artificial Sequence
  Synthetic peptide
  MOD_RES (2)..(2): Xaa is Aib
  MOD_RES (10)..(10): Acylated with a C16 fatty acyl group via beta-Ala-beta-Ala spacer
  MOD_RES (16)..(16): Xaa is Aib
  MOD_RES (29)..(29): AMIDATION
HXQGTFTSDKSKYLDXRRAQDFVQWLMNT

SEQ ID NO: 901 - protein, 29 aa, Artificial Sequence
  Synthetic peptide
  MOD_RES (2)..(2): Xaa is Aib
  MOD_RES (10)..(10): Acylated with a C16 fatty acyl group via 6-aminohexanoic acid spacer
  MOD_RES (16)..(16): Xaa is Aib
  MOD_RES (29)..(29): AMIDATION
HXQGTFTSDKSKYLDXRRAQDFVQWLMNT

SEQ ID NO: 902 - protein, 29 aa, Artificial Sequence
  Synthetic peptide
  MOD_RES (2)..(2): Xaa is Aib
  MOD_RES (10)..(10): Acylated with a C16 fatty acyl group via Leu-Leu spacer
  MOD_RES (16)..(16): Xaa is Aib
  MOD_RES (29)..(29): AMIDATION
HXQGTFTSDKSKYLDXRRAQDFVQWLMNT

SEQ ID NO: 903 - protein, 29 aa, Artificial Sequence
  Synthetic peptide
  MOD_RES (2)..(2): Xaa is Aib
  MOD_RES (10)..(10): Acylated with a C16 fatty acyl group via Pro-Pro spacer
  MOD_RES (16)..(16): Xaa is Aib
  MOD_RES (29)..(29): AMIDATION
HXQGTFTSDKSKYLDXRRAQDFVQWLMNT

SEQ ID NO: 904 - protein, 29 aa, Artificial Sequence
  Synthetic peptide
  MOD_RES (2)..(2): Xaa is Aib
  MOD_RES (10)..(10): Acylated with a C14 fatty acyl group
  MOD_RES (16)..(16): Xaa is Aib
  MOD_RES (24)..(24): Cys-PEG
  MOD_RES (29)..(29): AMIDATION
HXQGTFTSDKSKYLDXRRAQDFVCWLMNT

SEQ ID NO: 905 - protein, 29 aa, Artificial Sequence
  Synthetic peptide
  MOD_RES (2)..(2): Xaa is Aib
  MOD_RES (10)..(10): Acylated with a C14 fatty acyl group via dipeptide spacer
  MOD_RES (16)..(16): Xaa is Aib
  MOD_RES (24)..(24): Cys-PEG
  MOD_RES (29)..(29): AMIDATION
HXQGTFTSDKSKYLDXRRAQDFVCWLMNT

SEQ ID NO: 906 - protein, 29 aa, Artificial Sequence
  Synthetic peptide
  MOD_RES (2)..(2): Xaa is Aib
  MOD_RES (10)..(10): Acylated with a C14 fatty acyl group via dipeptide spacer
  MOD_RES (16)..(16): Xaa is Aib
  MOD_RES (29)..(29): AMIDATION
HXQGTFTSDKSKYLDXRRAQDFVQWLMNT

SEQ ID NO: 907 - protein, 29 aa, Artificial Sequence
  Synthetic peptide
  MOD_RES (2)..(2): Xaa is Aib
  MOD_RES (10)..(10): Acylated with a C14 fatty acyl group via Ala-Ala spacer
  MOD_RES (16)..(16): Xaa is Aib
  MOD_RES (24)..(24): Cys-PEG
  MOD_RES (29)..(29): AMIDATION
HXQGTFTSDKSKYLDXRRAQDFVCWLMNT

SEQ ID NO: 908 - protein, 29 aa, Artificial Sequence
  Synthetic peptide
  MOD_RES (2)..(2): Xaa is Aib
  MOD_RES (10)..(10): Acylated with a C14 fatty acyl group via Ala-Ala spacer
  MOD_RES (16)..(16): Xaa is Aib
  MOD_RES (29)..(29): AMIDATION
HXQGTFTSDKSKYLDXRRAQDFVQWLMNT

SEQ ID NO: 909 - protein, 29 aa, Artificial Sequence
  Synthetic peptide
  MOD_RES (2)..(2): Xaa is Aib
  MOD_RES (10)..(10): Acylated with a C16 fatty acyl group via Ala-Ala spacer
  MOD_RES (16)..(16): Xaa is Aib
  MOD_RES (24)..(24): Cys-PEG
  MOD_RES (29)..(29): AMIDATION
HXQGTFTSDKSKYLDXRRAQDFVCWLMNT

SEQ ID NO: 910 - protein, 29 aa, Artificial Sequence
  Synthetic peptide
  MOD_RES (2)..(2): Xaa is Aib
  MOD_RES (10)..(10): Acylated with a C16 fatty acyl group via dipeptide spacer
  MOD_RES (16)..(16): Xaa is Aib
  MOD_RES (24)..(24): Cys-PEG
  MOD_RES (29)..(29): AMIDATION
HXQGTFTSDKSKYLDXRRAQDFVCWLMNT

SEQ ID NO: 911 - protein, 29 aa, Artificial Sequence
  Synthetic peptide
  MOD_RES (2)..(2): Xaa is Aib
  MOD_RES (10)..(10): Covalently bound to a C14 fatty acyl group
  MOD_RES (16)..(16): Xaa is Aib
  MOD_RES (29)..(29): AMIDATION
HXQGTFTSDKSKYLDXRRAQDFVCWLMNT

SEQ ID NO: 912 - protein, 29 aa, Artificial Sequence
  Synthetic peptide
  MOD_RES (2)..(2): Xaa is Aib
  MOD_RES (10)..(10): Covalently bound to C14 fatty acyl group via dipeptide spacer
  MOD_RES (16)..(16): Xaa is Aib
  MOD_RES (29)..(29): AMIDATION
HXQGTFTSDKSKYLDXRRAQDFVCWLMNT

SEQ ID NO: 913 - protein, 29 aa, Artificial Sequence
  Synthetic peptide
  MOD_RES (2)..(2): Xaa is Aib
  MOD_RES (10)..(10): Covalently bound to C14 fatty acyl group via Ala-Ala spacer
  MOD_RES (16)..(16): Xaa is Aib
  MOD_RES (29)..(29): AMIDATION
HXQGTFTSDKSKYLDXRRAQDFVCWLMNT

SEQ ID NO: 914 - protein, 29 aa, Artificial Sequence
  Synthetic peptide
  MOD_RES (2)..(2): Xaa is Aib
  MOD_RES (10)..(10): Covalently bound to C16 fatty acyl group via dipeptide spacer
  MOD_RES (16)..(16): Xaa is Aib
  MOD_RES (29)..(29): AMIDATION
HXQGTFTSDKSKYLDXRRAQDFVCWLMNT

SEQ ID NO: 915 - protein, 29 aa, Artificial Sequence
  Synthetic peptide
  MOD_RES (2)..(2): Xaa is Aib
  MOD_RES (10)..(10): Covelently bound to C16 fatty acyl group via Ala-Ala spacer
  MOD_RES (16)..(16): Xaa is Aib
  MOD_RES (29)..(29): AMIDATION
HXQGTFTSDKSKYLDXRRAQDFVCWLMNT

SEQ ID NO: 916 - protein, 30 aa, Artificial Sequence; identical to SEQ ID NO: 581
  Synthetic peptide
  MOD_RES (2)..(2): D-serine, D-alanine, valine, amino n-butyric acid, glycine, N-methyl serine, aminoisobutyric acid
  MOD_RES (30)..(30): Acylated with a C14 fatty acyl group
  MOD_RES (30)..(30): AMIDATION

SEQ ID NO: 917 - protein, 29 aa, Artificial Sequence
  Synthetic peptide
  MOD_RES (2)..(2): D-serine, D-alanine, valine, amino n-butyric acid, glycine, N-methyl serine, aminoisobutyric acid
  MOD_RES (10)..(10): Acylated with a C14 fatty acyl group
  MOD_RES (29)..(29): AMIDATION
HXQGTFTSDKSKYLDERRAKDFVQWLMNT

SEQ ID NO: 918 - protein, 30 aa, Artificial Sequence; identical to SEQ ID NO: 581
  Synthetic peptide
  MOD_RES (2)..(2): D-serine, D-alanine, valine, amino n-butyric acid, glycine, N-methyl serine, aminoisobutyric acid
  MOD_RES (30)..(30): Acylated with a C16 fatty acyl group
  MOD_RES (30)..(30): AMIDATION

SEQ ID NO: 919 - protein, 29 aa, Artificial Sequence
  Synthetic peptide
  MOD_RES (2)..(2): D-serine, D-alanine, valine, amino n-butyric acid, glycine, N-methyl serine, aminoisobutyric acid
  MOD_RES (10)..(10): Acylated with a C16 fatty acyl group
  MOD_RES (29)..(29): AMIDATION
HXQGTFTSDKSKYLDERRAKDFVQWLMNT

SEQ ID NO: 920-1000 - skipped (81 entries)

SEQ ID NO: 1001 - protein, 29 aa, Homo sapiens
  MISC_FEATURE: Wild type glucagon
HSQGTFTSDYSKYLDSRRAQDFVQWLMNT

SEQ ID NO: 1002 - protein, 31 aa, Homo sapiens; identical to SEQ ID NO: 50
  MISC_FEATURE (1)..(31): GLP-1(7-37)

SEQ ID NO: 1003 - protein, 30 aa, Artificial sequence; identical to SEQ ID NO: 52
  Synthetic polypeptide
  MISC_FEATURE (1)..(30): GLP-1(7-36) amidated
  MISC_FEATURE (30)..(30): C-terminal amidation

SEQ ID NO: 1004 - protein, 42 aa, Homo sapiens; identical to SEQ ID NO: 707
  mat_peptide (1)..(42): gastric inhibitory polypeptide

SEQ ID NO: 1005 - protein, 29 aa, Artificial sequence
  Synthetic polypeptide
  MISC_FEATURE: Analog 61
  MISC_FEATURE (16)..(20): Lactam bridge between residues 16 and 20.
HSQGTFTSDYSKYLDEIHQKEFIAWLMNT

SEQ ID NO: 1006 - protein, 29 aa, Artificial sequence
  Synthetic polypeptide
  MISC_FEATURE: Analog 62
  MISC_FEATURE (16)..(20): Lactam bridge between residues 16 and 20.
HSQGTFTSDYSIYLDEIHQKEFIAWLMNT

SEQ ID NO: 1007 - protein, 29 aa, Artificial sequence
  Synthetic polypeptide
  MISC_FEATURE: Analog 63
  MISC_FEATURE (12)..(16): Lactam bridge between residues 12 and 16.
HSQGTFTSDYSKYLDEIHQKEFIAWLMNT

SEQ ID NO: 1008 - protein, 29 aa, Artificial sequence
  Synthetic polypeptide
  MISC_FEATURE: Analog 66
HSQGTFTSDYSKYLDEIHQKEFIAWLLAQ

SEQ ID NO: 1009 - protein, 29 aa, Artificial sequence
  Synthetic polypeptide
  MISC_FEATURE: Analog 68
HSQGTFTSDYSKYLDKIHQEEFIAWLMNT

SEQ ID NO: 1010 - protein, 29 aa, Artificial sequence
  Synthetic polypeptide
  MISC_FEATURE: Analog 69
  MISC_FEATURE (16)..(20): Lactam bridge between residues 16 and 20
HSQGTFTSDYSKYLDKIHQEEFIAWLMNT

SEQ ID NO: 1011 - protein, 29 aa, Artificial sequence
  Synthetic polypeptide
  MISC_FEATURE: Analog 84
  MISC_FEATURE (16)..(20): Lactam bridge between residues 16 and 20
HSQGTFTSDYSIYLDEIHQKEFICWLLAQ

SEQ ID NO: 1012 - protein, 29 aa, Artificial sequence
  Synthetic polypeptide
  MISC_FEATURE: Analog 85
  MISC_FEATURE (16)..(20): Lactam bridge between residues 16 and 20
  MISC_FEATURE (24)..(24): PEG (20kDa) covalently attached to Cysteine
HSQGTFTSDYSIYLDEIHQKEFICWLLAQ

SEQ ID NO: 1013 - protein, 29 aa, Artificial sequence
  Synthetic polypeptide
  MISC_FEATURE: Analog 92
HSQGTFTSDYSIYLDEKHQKEFIAWLLAQ

SEQ ID NO: 1014 - protein, 29 aa, Artificial sequence
  Synthetic polypeptide
  MISC_FEATURE: Analog 93
  MISC_FEATURE (16)..(20): Lactam bridge between residues 16 and 20
  MISC_FEATURE (17)..(21): Lactam bridge between residues 17 and 21
HSQGTFTSDYSIYLDEKHQKEFIAWLLAQ

SEQ ID NO: 1015 - protein, 29 aa, Artificial sequence
  Synthetic polypeptide
  MISC_FEATURE: Analog 95
  MISC_FEATURE (16)..(20): Lactam bridge between residues 16 and 20
HAEGTFISDYSIAMDEIHQKDFVNWLLAQ

SEQ ID NO: 1016 - protein, 29 aa, Artificial sequence
  Synthetic polypeptide
  MISC_FEATURE: Analog 96
  MISC_FEATURE (16)..(20): Lactam bridge between residues 16 and 20
YAEGTFISDYSIAMDEIHQKDFVNWLLAQ

SEQ ID NO: 1017 - protein, 29 aa, Artificial sequence
  Synthetic polypeptide
  MISC_FEATURE: Analog 97
  MISC_FEATURE (16)..(20): Lactam bridge between residues 16 and 20
HAEGTFTSDYSIYMDEIHQKDFVNWLLAQ

SEQ ID NO: 1018 - protein, 29 aa, Artificial sequence
  Synthetic polypeptide
  MISC_FEATURE: Analog 98
  MISC_FEATURE (16)..(20): Lactam bridge between residues 16 and 20
YAEGTFTSDYSIYMDEIHQKDFVNWLLAQ

SEQ ID NO: 1019 - protein, 42 aa, Artificial sequence
  Synthetic polypeptide
  MISC_FEATURE: Analog 99
YAEGTFISDYSIAMDKIHQQDFVNWLLAQKGKKNWLKHNITQ

SEQ ID NO: 1020 - protein, 42 aa, Artificial sequence
  Synthetic polypeptide
  MISC_FEATURE: Analog 100
  MOD_RES (2)..(2): Xaa is Aib
YXEGTFISDYSIAMDKIHQQDFVNWLLAQKGKKNWLKHNITQ

SEQ ID NO: 1021 - protein, 42 aa, Artificial sequence
  Synthetic polypeptide
  MISC_FEATURE: Analog 101
YAPGTFISDYSIAMDKIHQQDFVNWLLAQKGKKNWLKHNITQ

SEQ ID NO: 1022 - protein, 42 aa, Artificial sequence
  Synthetic polypeptide
  MISC_FEATURE: Analog 102
  MOD_RES (2)..(2): Xaa is Aib
YXEGTFISDYSIAMDKIHQQDFVCWLLAQKGKKNWLKHNITQ

SEQ ID NO: 1023 - protein, 42 aa, Artificial sequence
  Synthetic polypeptide
  MISC_FEATURE: Analog 104
YAPGTFISDYSIAMDKIHQQDFVCWLLAQKGKKNWLKHNITQ

SEQ ID NO: 1024 - protein, 42 aa, Artificial sequence; identical to SEQ ID NO: 1023
  Synthetic polypeptide
  MISC_FEATURE: Analog 105
  MISC_FEATURE (24)..(24): PEG (40kDa) attached to Cysteine

SEQ ID NO: 1025 - protein, 29 aa, Artificial sequence
  Synthetic polypeptide
  MISC_FEATURE: Analog 106
YAEGTFISDYSIAMDKIHQQDFVNWLLAQ

SEQ ID NO: 1026 - protein, 29 aa, Artificial sequence
  Synthetic polypeptide
  MISC_FEATURE: Analog 107
  MISC_FEATURE (16)..(20): Lactam bridge between residues 16 and 20
HSQGTFISDYSKYLDEIHQKEFIAWLMNT

SEQ ID NO: 1027 - protein, 29 aa, Artificial sequence
  Synthetic polypeptide
  MISC_FEATURE: Analog 108
  MISC_FEATURE (16)..(20): Lactam bridge between residues 16 and 20
HSQGTFISDYSKALDEIHQKEFIAWLMNT

SEQ ID NO: 1028 - protein, 29 aa, Artificial sequence
  Synthetic polypeptide
  MISC_FEATURE: Analog 109
  MISC_FEATURE (16)..(20): Lactam bridge between residues 16 and 20
YSQGTFTSDYSKYLDEIHQKDFVNWLLAQ

SEQ ID NO: 1029 - protein, 29 aa, Artificial sequence
  Synthetic polypeptide
  MISC_FEATURE: Analog 110
  MISC_FEATURE (16)..(20): Lactam bridge between residues 16 and 20
YSQGTFTSDYSIYLDEIHQKDFVNWLLAQ

SEQ ID NO: 1030 - protein, 29 aa, Artificial sequence
  Synthetic polypeptide
  MISC_FEATURE: Analog 111
  MISC_FEATURE (16)..(20): Lactam bridge between residues 16 and 20
HSQGTFTSDYSKYLDEIHQKDFVNWLLAQ

SEQ ID NO: 1031 - protein, 24 aa, Artificial sequence
  Synthetic polypeptide
  MISC_FEATURE: Analog 113
  MOD_RES (1)..(1): Xaa is 3-phenyllactic acid
  MISC_FEATURE (11)..(15): Lactam bridge between residues 11 and 15
XISDYSIAMDEIHQKDFVNWLLAQ

SEQ ID NO: 1032 - protein, 24 aa, Artificial sequence
  Synthetic polypeptide
  MISC_FEATURE: Analog 114
  MOD_RES (1)..(1): Xaa is 3-phenyllactic acid
  MISC_FEATURE (11)..(15): Lactam bridge between residues 11 and 15
XTSDYSKYLDEIHQKDFVNWLLAQ

SEQ ID NO: 1033 - protein, 39 aa, Artificial sequence
  Synthetic polypeptide
  MISC_FEATURE: Analog 115
  MISC_FEATURE (16)..(20): Lactam bridge between residues 16 and 20
HSQGTFTSDYSKYLDEIHQKDFVNWLLAGGPSSGAPPPS

SEQ ID NO: 1034 - protein, 39 aa, Artificial sequence
  Synthetic polypeptide
  MISC_FEATURE: Analog 116
  MISC_FEATURE (16)..(20): Lactam bridge between residues 16 and 20
YSQGTFTSDYSKYLDEIHQKDFVNWLLAGGPSSGAPPPS

SEQ ID NO: 1035 - protein, 29 aa, Artificial sequence
  Synthetic polypeptide
  MISC_FEATURE: Analog 118
  MISC_FEATURE (16)..(20): Lactam bridge between residues 16 and 20
YSQGTFTSDYSKYLDEIHQKEFVNWLLAQ

SEQ ID NO: 1036 - protein, 39 aa, Artificial sequence
  Synthetic polypeptide
  MISC_FEATURE: Analog 120
  MISC_FEATURE (16)..(20): Lactam bridge between residues 16 and 20
YSQGTFTSDYSKYLDEQAAKEFIAWLMNGGPSSGAPPPS

SEQ ID NO: 1037 - protein, 29 aa, Artificial sequence
  Synthetic polypeptide
  MISC_FEATURE: Analog 124
  MISC_FEATURE (16)..(20): Lactam bridge between residues 16 and 20
HSQGTFTSDYSIYMDEIHQKDFVNWLLAQ

SEQ ID NO: 1038 - protein, 29 aa, Artificial sequence
  Synthetic polypeptide
  MISC_FEATURE: Analog 125
  MISC_FEATURE (16)..(20): Lactam bridge between residues 16 and 20
YSQGTFTSDYSIYMDEIHQKDFVNWLLAQ

SEQ ID NO: 1039 - protein, 39 aa, Artificial sequence
  Synthetic polypeptide
  MISC_FEATURE: Analog 127
  MISC_FEATURE (16)..(20): Lactam bridge between residues 16 and 20
YSQGTFTSDYSKYLDEQAAKEFVNWLLAGGPSSGAPPPS

SEQ ID NO: 1040 - protein, 39 aa, Artificial sequence
  Synthetic polypeptide
  MISC_FEATURE: Analog 128
  MISC_FEATURE (16)..(20): Lactam bridge between residues 16 and 20
HSQGTFTSDYSKYLDEIHQKDFIAWLMNGGPSSGAPPPS

SEQ ID NO: 1041 - protein, 39 aa, Artificial sequence
  Synthetic polypeptide
  MISC_FEATURE: Analog 129
  MISC_FEATURE (16)..(20): Lactam bridge between residues 16 and 20
YSQGTFTSDYSKYLDEIHQKDFIAWLMNGGPSSGAPPPS

SEQ ID NO: 1042 - protein, 39 aa, Artificial sequence
  Synthetic polypeptide
  MISC_FEATURE: Analog 139
  MISC_FEATURE (16)..(20): Lactam bridge between residues 16 and 20
YSQGTFTSDYSKYLDEQAAKEFIAWLLAGGPSSGAPPPS

SEQ ID NO: 1043 - protein, 39 aa, Artificial sequence
  Synthetic polypeptide
  MISC_FEATURE: Analog 140
  MISC_FEATURE (16)..(20): Lactam bridge between residues 16 and 20
YSQGTFTSDYSIYLDEQAAKEFVNWLLAGGPSSGAPPPS

SEQ ID NO: 1044 - protein, 39 aa, Artificial sequence
  Synthetic polypeptide
  MISC_FEATURE: Analog 141
  MISC_FEATURE (16)..(20): Lactam bridge between residuess 16 and 20
YSQGTFTSDYSKYMDEQAAKEFVNWLLAGGPSSGAPPPS

SEQ ID NO: 1045 - protein, 39 aa, Artificial sequence
  Synthetic polypeptide
  MISC_FEATURE: Analog 142
  MISC_FEATURE (16)..(20): Lactam bridge between residues 16 and 20
YAEGTFTSDYSIYMDEQAAKEFVNWLLAGGPSSGAPPPS

SEQ ID NO: 1046 - protein, 39 aa, Artificial sequence
  Synthetic polypeptide
  MISC_FEATURE: Analog 143
  MISC_FEATURE (16)..(20): Lactam bridge between residues 16 and 20
YSQGTFTSDYSKYLDERRAKEFVNWLLAGGPSSGAPPPS

SEQ ID NO: 1047 - protein, 39 aa, Artificial sequence
  Synthetic polypeptide
  MISC_FEATURE: Analog 144
  MISC_FEATURE (16)..(20): Lactam bridge between residues 16 and 20
YAQGTFTSDYSIYMDEQAAKEFVNWLLAGGPSSGAPPPS

SEQ ID NO: 1048 - protein, 39 aa, Artificial sequence
  Synthetic polypeptide
  MISC_FEATURE: Analog 145
  MISC_FEATURE (16)..(20): Lactam bridge between residues 16 and 20
YAQGTFISDYSKYLDEQAAKEFVNWLLAGGPSSGAPPPS

SEQ ID NO: 1049 - protein, 39 aa, Artificial sequence; identical to SEQ ID NO: 1048
  Synthetic polypeptide
  MISC_FEATURE: Analog 146
  MISC_FEATURE (16)..(20): Lactam bridge between residues 16 and 20

SEQ ID NO: 1050 - protein, 39 aa, Artificial sequence
  Synthetic polypeptide
  MISC_FEATURE: Analog 147
  MISC_FEATURE (16)..(20): Lactam bridge between residues 16 and 20
YSQGTFTSDYSIYLDEQAAKEFIAWLLAGGPSSGAPPPS

SEQ ID NO: 1051 - protein, 39 aa, Artificial sequence
  Synthetic polypeptide
  MISC_FEATURE: Analog 148
  MISC_FEATURE (16)..(20): Lactam bridge between residues 16 and 20
YSEGTFTSDYSIYLDEQAAKEFIAWLLAGGPSSGAPPPS

SEQ ID NO: 1052 - protein, 39 aa, Artificial sequence
  Synthetic polypeptide
  MISC_FEATURE: Analog 149
  MISC_FEATURE (16)..(20): Lactam bridge between residues 16 and 20
YAEGTFTSDYSIYLDEQAAKEFVNWLLAGGPSSGAPPPS

SEQ ID NO: 1053 - protein, 39 aa, Artificial sequence
  Synthetic polypeptide
  MISC_FEATURE: Analog 150
  MISC_FEATURE (16)..(20): Lactam bridge between residues 16 and 20
YSQGTFISDYSIYLDEQAAKEFVNWLLAGGPSSGAPPPS

SEQ ID NO: 1054 - protein, 39 aa, Artificial sequence; identical to SEQ ID NO: 1042
  Synthetic polypeptide
  MISC_FEATURE: Analog 151
  MISC_FEATURE (16)..(20): Lactam bridge between residues 16 and 20

SEQ ID NO: 1055 - protein, 39 aa, Artificial sequence
  Synthetic polypeptide
  MISC_FEATURE: Analog 152
  MOD_RES (2)..(2): Xaa is Aib
  MISC_FEATURE (16)..(20): Lactam bridge between residues 16 and 20
YXQGTFTSDYSIYLDEQAAKEFVNWLLAGGPSSGAPPPS

SEQ ID NO: 1056 - protein, 39 aa, Artificial sequence
  Synthetic polypeptide
  MISC_FEATURE: Analog 154
  MOD_RES (1)..(1): Xaa is hippuric acid
  MISC_FEATURE (16)..(20): Lactam bridge between residues 16 and 20
XSQGTFTSDYSIYLDEQAAKEFVNWLLAGGPSSGAPPPS

SEQ ID NO: 1057 - protein, 39 aa, Artificial sequence; identical to SEQ ID NO: 1039
  Synthetic polypeptide
  MISC_FEATURE: Analog 155
  MISC_FEATURE (12)..(16): Lactam bridge between residues 12 and 16

SEQ ID NO: 1058 - protein, 39 aa, Artificial sequence
  Synthetic polypeptide
  MISC_FEATURE: Analog 156
  MISC_FEATURE (20)..(24): Lactam bridge between residues 20 and 24
YSQGTFTSDYSIYLDEQAAKEFVEWLLAGGPSSGAPPPS

SEQ ID NO: 1059 - protein, 39 aa, Artificial sequence
  Synthetic polypeptide
  MISC_FEATURE: Analog 157
  MISC_FEATURE (24)..(28): Lactam bridge between residues 24 and 28
YSQGTFTSDYSIYLDEQAAKEFVEWLLKGGPSSGAPPPS

SEQ ID NO: 1060 - protein, 39 aa, Artificial sequence
  Synthetic polypeptide
  MISC_FEATURE: Analog 158
  MOD_RES (2)..(2): Xaa is Aib
  MISC_FEATURE (16)..(20): Lactam bridge between residues 16 and 20
YXQGTFTSDYSIYLDEQAAKEFVCWLLAGGPSSGAPPPS

SEQ ID NO: 1061 - protein, 39 aa, Artificial sequence
  Synthetic polypeptide
  MISC_FEATURE: Analog 162
  MOD_RES (2)..(2): Xaa is Aib
  MISC_FEATURE (16)..(20): Lactam bridge between residues 16 and 20
YXQGTFTSDYSYYLDEQAVKEFVNWLIAGGPSSGAPPPS

SEQ ID NO: 1062 - protein, 29 aa, Artificial sequence
  Synthetic polypeptide
  MISC_FEATURE: Analog 163
  MISC_FEATURE (16)..(20): Lactam bridge between residues 16 and 20
YSQGTFTSDYSIYLDEQAAKEFVNWLLAG

SEQ ID NO: 1063 - protein, 29 aa, Artificial sequence
  Synthetic polypeptide
  MISC_FEATURE: Analog 164
  MOD_RES (2)..(2): Xaa is Aib
  MISC_FEATURE (16)..(20): Lactam bridge between residues 16 and 20
YXQGTFTSDYSIYLDEQAAKEFVNWLLAG

SEQ ID NO: 1064 - protein, 40 aa, Artificial sequence
  Synthetic polypeptide
  MISC_FEATURE: Analog 165
  MOD_RES (2)..(2): Xaa is Aib
  MISC_FEATURE (16)..(20): Lactam bridge between residues 16 and 20
YXQGTFTSDYSIYLDEQAAKEFVNWLLAGGPSSGAPPPSC

SEQ ID NO: 1065 - protein, 40 aa, Artificial sequence; identical to SEQ ID NO: 1064
  Synthetic polypeptide
  MISC_FEATURE: Analog 166
  MOD_RES (2)..(2): Xaa is d-alanine
  MISC_FEATURE (16)..(20): Lactam bridge between residues 16 and 20

SEQ ID NO: 1066 - protein, 39 aa, Artificial sequence
  Synthetic polypeptide
  MISC_FEATURE: Analog 167
  MISC_FEATURE (17)..(20): Lactam bridge between residues 17 and 20
YSQGTFTSDYSIYLDEEAAKEFVNWLLAGGPSSGAPPPS

SEQ ID NO: 1067 - protein, 39 aa, Artificial sequence
  Synthetic polypeptide
  MISC_FEATURE: Analog 168
  MISC_FEATURE (18)..(21): Lactam bridge between residues 18 and 21
YSQGTFTSDYSIYLDEQKAKEFVNWLLAGGPSSGAPPPS

SEQ ID NO: 1068 - protein, 29 aa, Artificial sequence
  Synthetic polypeptide
  MISC_FEATURE: Analog 169
  MOD_RES (2)..(2): Xaa is Aib
  MISC_FEATURE (16)..(20): Lactam bridge between residues 16 and 20
YXQGTFTSDYSIYLDEQAAKEFVCWLLAG

SEQ ID NO: 1069 - protein, 40 aa, Artificial sequence; identical to SEQ ID NO: 1064
  Synthetic polypeptide
  MISC_FEATURE: Analog 170
  MOD_RES (2)..(2): Xaa is Aib
  MISC_FEATURE (16)..(20): Lactam bridge between residues 16 and 20
  MISC_FEATURE (40)..(40): PEG (40kDa) covalently attached to Cysteine

SEQ ID NO: 1070 - protein, 29 aa, Artificial sequence
  Synthetic polypeptide
  MISC_FEATURE: Analog 172
  MOD_RES (2)..(2): Xaa is Aib
  MISC_FEATURE (16)..(20): Lactam bridge between residues 16 and 20
  MISC_FEATURE (24)..(24): PEG (40kDa) covalently attached to Cysteine
YXQGTFTSDYSIYLDEQAAKEFVCWLLAG

SEQ ID NO: 1071 - protein, 40 aa, Artificial sequence; identical to SEQ ID NO: 761
  Synthetic polypeptide
  MISC_FEATURE: Analog 174
  MOD_RES (2)..(2): Xaa is Aib
  MISC_FEATURE (16)..(20): Lactam bridge between residues 16 and 20

SEQ ID NO: 1072 - protein, 39 aa, Artificial sequence; identical to SEQ ID NO: 1060
  Synthetic polypeptide
  MISC_FEATURE: Analog 175
  MOD_RES (2)..(2): Xaa is Aib
  MISC_FEATURE (16)..(20): Lactam bridge between residues 16 and 20
  MISC_FEATURE (24)..(24): PEG (40kDa) covalently attached to Cysteine

SEQ ID NO: 1073 - protein, 40 aa, Artificial sequence
  Synthetic polypeptide
  MISC_FEATURE: Analog 176
  MOD_RES (2)..(2): Xaa is Aib
  MISC_FEATURE (16)..(20): Lactam bridge between residues 16 and 20
YXQGTFISDYSIYLDEQAAKEFVNWLLAGGPSSGAPPPSC

SEQ ID NO: 1074 - protein, 29 aa, Artificial sequence
  Synthetic polypeptide
  MISC_FEATURE: Analog 177
  MOD_RES (2)..(2): Xaa is Aib
  MISC_FEATURE (16)..(20): Lactam bridge between residues 16 and 20
YXQGTFISDYSIYLDEQAAKEFVCWLLAG

SEQ ID NO: 1075 - protein, 40 aa, Artificial sequence; identical to SEQ ID NO: 761
  Synthetic polypeptide
  MISC_FEATURE: Analog 178
  MOD_RES (2)..(2): Xaa is Aib
  MISC_FEATURE (16)..(20): Lactam bridge between residues 16 and 20
  MISC_FEATURE (40)..(40): PEG (40kDa) covalently attached to Cysteine

SEQ ID NO: 1076 - protein, 29 aa, Artificial sequence
  Synthetic polypeptide
  MISC_FEATURE: Analog 179
  MOD_RES (2)..(2): Xaa is Aib
  MISC_FEATURE (16)..(20): Lactam bridge between residues 16 and 20
  MISC_FEATURE (24)..(24): PEG (40kDa) covalently attached to Cysteine
YXQGTFISDYSIYLDEQAAKEFVCWLLAG

SEQ ID NO: 1077 - protein, 40 aa, Artificial sequence; identical to SEQ ID NO: 1073
  Synthetic polypeptide
  MISC_FEATURE: Analog 182
  MOD_RES (2)..(2): Xaa is Aib
  MISC_FEATURE (16)..(20): Lactam bridge between residues 16 and 20
  MISC_FEATURE (40)..(40): PEG (40kDa) covalently attached to Cysteine

SEQ ID NO: 1078 - protein, 29 aa, Artificial sequence
  Synthetic polypeptide
  MISC_FEATURE: Analog 186
  MOD_RES (2)..(2): Xaa is Aib
  MISC_FEATURE (16)..(20): Lactam bridge between residues 16 and 20
  MISC_FEATURE (24)..(24): PEG (40kDa) covalently attached to Cysteine
YXQGTFTSDYSIYLDEQAAKEFVCWLMNG

SEQ ID NO: 1079 - protein, 39 aa, Artificial sequence; identical to SEQ ID NO: 1055
  Synthetic polypeptide
  MISC_FEATURE: Analog 191
  MOD_RES (2)..(2): Xaa is Aib

SEQ ID NO: 1080 - protein, 34 aa, Artificial sequence
  Synthetic polypeptide
  MISC_FEATURE: Analog 192
FTSDYSIYLDEQAAKEFVNWLLAGGPSSGAPPPS

SEQ ID NO: 1081 - protein, 38 aa, Artificial sequence
  Synthetic polypeptide
  MISC_FEATURE: Analog 194
  MOD_RES (1)..(1): Xaa is Aib
XQGTFTSDYSIYLDEEAVRLFVNWLLAGGPSSGAPPPS

SEQ ID NO: 1082 - protein, 26 aa, Artificial sequence
  Synthetic polypeptide
  MISC_FEATURE: Analog 197
  MISC_FEATURE (13)..(17): Lactam bridge between residues 13 and 17
GTFTSDYSIYLDEQAAKEFVNWLLAG

SEQ ID NO: 1083 - protein, 28 aa, Artificial sequence
  Synthetic polypeptide
  MISC_FEATURE: Analog 198
  MOD_RES (1)..(1): Xaa is Aib
  MISC_FEATURE (15)..(19): Lactam bridge between residues 15 and 19
XQGTFTSDYSIYLDEQAAKEFVNWLLAG

SEQ ID NO: 1084 - protein, 40 aa, Artificial sequence
  Synthetic polypeptide
  MISC_FEATURE: Analog 199
  MOD_RES (2)..(2): Xaa is Aib
  MISC_FEATURE (16)..(20): Lactam bridge between residues 16 and 20
YXQGTFVSDYSIYLDEQAAKEFVNWLLAGGPSSGAPPPSC

SEQ ID NO: 1085 - protein, 40 aa, Artificial sequence
  Synthetic polypeptide
  MISC_FEATURE: Analog 200
  MOD_RES (2)..(2): Xaa is Aib
  MISC_FEATURE (16)..(20): Lactam bridge between residues 16 and 20
  MOD_RES (27)..(27): Xaa is Nle
YXQGTFTSDYSIYLDEQAAKEFVNWLXAGGPSSGAPPPSC

SEQ ID NO: 1086 - protein, 39 aa, Artificial sequence
  Synthetic polypeptide
  MISC_FEATURE: Analog 201
  MOD_RES (2)..(2): Xaa is Aib
YXQGTFTSDYSIYLDEEAVRLFVNWLLAGGPSSGAPPPS

SEQ ID NO: 1087 - protein, 40 aa, Artificial sequence; identical to SEQ ID NO: 1084
  Synthetic polypeptide
  MISC_FEATURE: Analog 202
  MOD_RES (2)..(2): Xaa is Aib
  MISC_FEATURE (16)..(20): Lactam bridge between residues 16 and 20
  MISC_FEATURE (40)..(40): PEG (40kDa) covalently attached to Cysteine

SEQ ID NO: 1088 - protein, 40 aa, Artificial sequence; identical to SEQ ID NO: 1085
  Synthetic polypeptide
  MISC_FEATURE: Analog 203
  MOD_RES (2)..(2): Xaa is Aib
  MISC_FEATURE (16)..(20): Lactam bridge between residues 16 and 20
  MOD_RES (27)..(27): Xaa is Nle
  MISC_FEATURE (40)..(40): PEG (40kDa) covalently attached to Cysteine

SEQ ID NO: 1089 - protein, 40 aa, Artificial sequence
  Synthetic polypeptide
  MISC_FEATURE: Analog 204
  MOD_RES (2)..(2): Xaa is Aib
  MISC_FEATURE (16)..(20): Lactam bridge between residues 16 and 20
YXEGTFTSDYSIYLDEQAAKEFVNWLLAGRPSSGAPPPSC

SEQ ID NO: 1090 - protein, 40 aa, Artificial sequence; identical to SEQ ID NO: 1089
  Synthetic polypeptide
  MISC_FEATURE: Analog 205
  MOD_RES (2)..(2): Xaa is Aib
  MISC_FEATURE (16)..(20): Lactam bridge between residues 16 and 20
  MISC_FEATURE (40)..(40): PEG (40kDa) covalently attached to Cysteine

SEQ ID NO: 1091 - protein, 43 aa, Artificial sequence
  Synthetic polypeptide
  MISC_FEATURE: Analog 206
  MOD_RES (2)..(2): Xaa is Aib
  MISC_FEATURE (16)..(20): Lactam bridge between residues 16 and 20
YXEGTFTSDYSIYLDEQAAKEFVNWLLAGKGKKNWLKHNITQC

SEQ ID NO: 1092 - protein, 43 aa, Artificial sequence
  Synthetic polypeptide
  MISC_FEATURE: Analog 207
  MOD_RES (2)..(2): Xaa is Aib
  MISC_FEATURE (16)..(20): Lactam bridge between residues 16 and 20
YXQGTFTSDYSIYLDEQAAKEFVNWLLAGKGKKNWLKHNITQC

SEQ ID NO: 1093 - protein, 43 aa, Artificial sequence; identical to SEQ ID NO: 1091
  Synthetic polypeptide
  MISC_FEATURE: Analog 208
  MOD_RES (2)..(2): Xaa is Aib
  MISC_FEATURE (16)..(20): Lactam bridge between residues 16 and 20
  MISC_FEATURE (43)..(43): PEG (40kDa) covalently attached to Cysteine

SEQ ID NO: 1094 - protein, 40 aa, Artificial sequence
  Synthetic polypeptide
  MISC_FEATURE: Analog 209
  MOD_RES (2)..(2): Xaa is Aib
  MISC_FEATURE (9)..(12): Lactam bridge between residues 9 and 12
  MISC_FEATURE (16)..(20): Lactam bridge between residues 16 and 20
YXQGTFTSEYSKYLDEQAAKEFVNWLLAGGPSSGAPPPSC

SEQ ID NO: 1095 - protein, 10 aa, Artificial sequence
  Synthetic polypeptide
  MISC_FEATURE: CEX
GPSSGAPPPS

SEQ ID NO: 1096 - protein, 11 aa, Artificial sequence
  Synthetic polypeptide
  MISC_FEATURE (1)..(1): Xaa is any amino acid
XGPSSGAPPPS

SEQ ID NO: 1097 - protein, 8 aa, Artificial sequence
  Synthetic polypeptide
KRNRNNIA

SEQ ID NO: 1098 - protein, 4 aa, Artificial sequence
  Synthetic polypeptide
KRNR

SEQ ID NO: 1099 - protein, 40 aa, Artificial Sequence; identical to SEQ ID NO: 760
  Synthetic polypeptide
  MOD_RES (2)..(2): Xaa is Aib
  MOD_RES (20)..(20): Xaa is Aib
  MISC_FEATURE (40)..(40): PEG (40kDa) covalently attached to Cysteine
  MISC_FEATURE (40)..(40): C-terminal amidation

SEQ ID NO: 1100 - protein, 40 aa, Artificial Sequence; identical to SEQ ID NO: 759
  Synthetic polypeptide
  MOD_RES (2)..(2): Xaa is Aib
  MOD_RES (20)..(20): Xaa is Aib
  MISC_FEATURE (24)..(24): PEG (40kDa) covalently attached to Cysteine
  MISC_FEATURE (40)..(40): C-terminal amidation

SEQ ID NO: 1101 - protein, 40 aa, Artificial Sequence; identical to SEQ ID NO: 759
  Synthetic polypeptide
  MOD_RES (2)..(2): Xaa is Aib
  MOD_RES (20)..(20): Xaa is Aib
  MISC_FEATURE (24)..(24): PEG (40kDa) covalently attached to Cysteine
  MISC_FEATURE (40)..(40): 16 Carbon fatty acyl group covalently attached to Lysine
  MISC_FEATURE (40)..(40): C-terminal amidation

SEQ ID NO: 1102 - protein, 40 aa, Artificial Sequence; identical to SEQ ID NO: 759
  Synthetic polypeptide
  MOD_RES (2)..(2): Xaa is Aib
  MOD_RES (20)..(20): Xaa is Aib
  MISC_FEATURE (24)..(24): PEG (40kDa) covalently attached to Cysteine
  MISC_FEATURE (40)..(40): 14 Carbon fatty acyl group covalently attached Lysine
  MISC_FEATURE (40)..(40): C-terminal amidation

SEQ ID NO: 1103 - protein, 40 aa, Artificial Sequence; identical to SEQ ID NO: 759
  Synthetic polypeptide
  MOD_RES (2)..(2): Xaa is Aib
  MOD_RES (20)..(20): Xaa is Aib
  MISC_FEATURE (24)..(24): PEG (40kDa) covalently attached to Cysteine
  MISC_FEATURE (40)..(40): 18 Carbon fatty acyl group covalently attached to Lysine
  MISC_FEATURE (40)..(40): C-terminal amidation

SEQ ID NO: 1104 - protein, 40 aa, Artificial Sequence; identical to SEQ ID NO: 756
  Synthetic polypeptide
  MOD_RES (2)..(2): Xaa is Aib
  MOD_RES (20)..(20): Xaa is Aib
  MISC_FEATURE (40)..(40): 14 Carbon fatty acyl group covalently attached to Lysine
  MISC_FEATURE (40)..(40): C-terminal amidation

SEQ ID NO: 1105 - protein, 40 aa, Artificial Sequence; identical to SEQ ID NO: 756
  Synthetic polypeptide
  MOD_RES (2)..(2): Xaa is Aib
  MOD_RES (20)..(20): Xaa is Aib
  MISC_FEATURE (40)..(40): 16 Carbon fatty acyl group covalently attached Lysine
  MISC_FEATURE (40)..(40): C-terminal amidation

SEQ ID NO: 1106 - protein, 40 aa, Artificial Sequence; identical to SEQ ID NO: 756
  Synthetic polypeptide
  MOD_RES (2)..(2): Xaa is Aib
  MOD_RES (20)..(20): Xaa is Aib
  MISC_FEATURE (40)..(40): 18 Carbon fatty acyl group covalently attached to Lysine
  MISC_FEATURE (40)..(40): C-terminal amidation

SEQ ID NO: 1107 - protein, 40 aa, Artificial Sequence
  Synthetic polypeptide
  MOD_RES (2)..(2): Xaa is Aib
  MOD_RES (20)..(20): Xaa is Aib
  MISC_FEATURE (40)..(40): C-terminal amidation
YXQGTFTSDYSIYLDKQAAXEFVNWLLAGGPSSGAPPPSC

SEQ ID NO: 1108 - protein, 40 aa, Artificial Sequence; identical to SEQ ID NO: 1107
  Synthetic polypeptide
  MOD_RES (2)..(2): Xaa is Aib
  MOD_RES (20)..(20): Xaa is Aib
  MISC_FEATURE (40)..(40): PEG (40kDa) attached to Cysteine
  MISC_FEATURE (40)..(40): C-terminal amidation

SEQ ID NO: 1109 - protein, 40 aa, Artificial Sequence; identical to SEQ ID NO: 760
  Synthetic polypeptide
  MOD_RES (2)..(2): Xaa is Aib
  MOD_RES (20)..(20): Xaa is Aib
  MISC_FEATURE (40)..(40): C-terminal amidation

SEQ ID NO: 1110 - protein, 29 aa, Artificial Sequence
  Synthetic polypeptide
  MOD_RES (2)..(2): Xaa is Aib
  MOD_RES (20)..(20): Xaa is Aib
  MISC_FEATURE (29)..(29): C-terminal amidation
YXQGTFTSDYSIYLDKQAAXEFVCWLLAG

SEQ ID NO: 1111 - protein, 40 aa, Artificial Sequence; identical to SEQ ID NO: 756
  Synthetic polypeptide
  MOD_RES (2)..(2): Xaa is Aib
  MOD_RES (20)..(20): Xaa is Aib
  MISC_FEATURE (40)..(40): C-terminal amidation

SEQ ID NO: 1112 - protein, 29 aa, Artificial Sequence
  Synthetic polypeptide
  MISC_FEATURE (2)..(2): Xaa is Aib
  MISC_FEATURE (20)..(20): Xaa is Aib
YXQGTFTSDYSIYLDKQAAXEFVNWLLAG

SEQ ID NO: 1113 - protein, 39 aa, Artificial Sequence
  Synthetic polypeptide
  MOD_RES (2)..(2): Xaa is Aib
  MOD_RES (20)..(20): Xaa is Aib
  MISC_FEATURE (24)..(24): 14 Carbon fatty acyl group covalently attached to Lysine
  MISC_FEATURE (39)..(39): C-terminal amidation
YXEGTFTSDYSIYLDKQAAXEFVKWLLAGGPSSGAPPPS

SEQ ID NO: 1114 - protein, 39 aa, Artificial Sequence; identical to SEQ ID NO: 1113
  Synthetic polypeptide
  MOD_RES (2)..(2): Xaa is Aib
  MOD_RES (20)..(20): Xaa is Aib
  MISC_FEATURE (24)..(24): 16 Carbon fatty acyl group covalently attached to Lysine
  MISC_FEATURE (39)..(39): C-terminal amidation

SEQ ID NO: 1115 - protein, 39 aa, Artificial Sequence; identical to SEQ ID NO: 1113
  Synthetic polypeptide
  MOD_RES (2)..(2): Xaa is Aib
  MOD_RES (20)..(20): Xaa is Aib
  MISC_FEATURE (24)..(24): 18 Carbon fatty acyl group covalently attached to Lysine
  MISC_FEATURE (39)..(39): C-terminal amidation

SEQ ID NO: 1116 - protein, 39 aa, Artificial Sequence; identical to SEQ ID NO: 1113
  Synthetic polypeptide
  MOD_RES (2)..(2): Xaa is Aib
  MOD_RES (20)..(20): Xaa is Aib
  MISC_FEATURE (39)..(39): C-terminal amidation

SEQ ID NO: 1117 - protein, 39 aa, Artificial Sequence; identical to SEQ ID NO: 758
  Synthetic polypeptide
  MOD_RES (2)..(2): Xaa is Aib
  MISC_FEATURE (10)..(10): 14 Carbon fatty acyl group covalently attached to Lysine
  MOD_RES (20)..(20): Xaa is Aib
  MISC_FEATURE (39)..(39): C-terminal amidation

SEQ ID NO: 1118 - protein, 39 aa, Artificial Sequence; identical to SEQ ID NO: 758
  Synthetic polypeptide
  MOD_RES (2)..(2): Xaa is Aib
  MISC_FEATURE (10)..(10): 16 Carbon fatty acyl group covalently attached to Lysine
  MOD_RES (20)..(20): Xaa is Aib
  MISC_FEATURE (39)..(39): C-terminal amidation

SEQ ID NO: 1119 - protein, 39 aa, Artificial Sequence; identical to SEQ ID NO: 758
  Synthetic polypeptide
  MOD_RES (2)..(2): Xaa is Aib
  MISC_FEATURE (10)..(10): 18 Carbon fatty acyl group covalently attached to Lysine
  MOD_RES (20)..(20): Xaa is Aib
  MISC_FEATURE (39)..(39): C-terminal amidation

SEQ ID NO: 1120 - protein, 39 aa, Artificial Sequence; identical to SEQ ID NO: 758
  Synthetic polypeptide
  MOD_RES (2)..(2): Xaa is Aib
  MOD_RES (20)..(20): Xaa is Aib
  MISC_FEATURE (39)..(39): C-terminal amidation

SEQ ID NO: 1121 - protein, 40 aa, Artificial Sequence
  Synthetic polypeptide
  MOD_RES (2)..(2): Xaa is Aib
  MOD_RES (16)..(16): Xaa is Orn
  MOD_RES (20)..(20): Xaa is Aib
  MISC_FEATURE (40)..(40): C-terminal amidation
YXQGTFTSDYSIYLDXQAAXEFVNWLLAGGPSSGAPPPSC

SEQ ID NO: 1122 - protein, 40 aa, Artificial Sequence; identical to SEQ ID NO: 1121
  Synthetic polypeptide
  MOD_RES (2)..(2): Xaa is Aib
  MOD_RES (16)..(16): Xaa is 2,4-diaminobutyric acid
  MOD_RES (20)..(20): Xaa is Aib
  MISC_FEATURE (40)..(40): C-terminal amidation

SEQ ID NO: 1123 - protein, 40 aa, Artificial Sequence
  Synthetic polypeptide
  MOD_RES (2)..(2): Xaa is Aib
  MOD_RES (20)..(20): Xaa is Aib
  MISC_FEATURE (40)..(40): 14 Carbon fatty acyl group covalentaly attached to Lysine
  MISC_FEATURE (40)..(40): C-terminal amidation
YXQGTFTSDYSIYLDKQAAXEFVNWLLAGGPSSGAPPPSK

SEQ ID NO: 1124 - protein, 40 aa, Artificial Sequence; identical to SEQ ID NO: 1123
  Synthetic polypeptide
  MOD_RES (2)..(2): Xaa is Aib
  MOD_RES (20)..(20): Xaa is Aib
  MISC_FEATURE (40)..(40): 16 Carbon fatty acyl group covalently attached to Lysine
  MISC_FEATURE (40)..(40): C-terminal amidation

SEQ ID NO: 1125 - protein, 40 aa, Artificial Sequence; identical to SEQ ID NO: 1123
  Synthetic polypeptide
  MOD_RES (2)..(2): Xaa is Aib
  MOD_RES (20)..(20): Xaa is Aib
  MISC_FEATURE (40)..(40): 18 Carbon fatty acyl group covalently attached to Lysine
  MISC_FEATURE (40)..(40): C-terminal amidation

SEQ ID NO: 1126 - protein, 40 aa, Artificial Sequence; identical to SEQ ID NO: 1123
  Synthetic polypeptide
  MOD_RES (2)..(2): Xaa is Aib
  MOD_RES (20)..(20): Xaa is Aib
  MISC_FEATURE (40)..(40): C-terminal amidation

SEQ ID NO: 1127 - protein, 29 aa, Artificial Sequence
  Synthetic polypeptide
  MOD_RES (2)..(2): Xaa is Aib
  MOD_RES (20)..(20): Xaa is Aib
  MISC_FEATURE (24)..(24): PEG (40kDa) covalently attached to Cysteine
  MISC_FEATURE (29)..(29): C-terminal amidation
YXQGTFTSDYSIYLDKQAAXEFVCWLLAG

SEQ ID NO: 1128 - protein, 29 aa, Artificial Sequence
  Synthetic polypeptide
  MOD_RES (2)..(2): Xaa is Aib
  MISC_FEATURE (10)..(10): 14 Carbon fatty acyl group covalently attached to Lysine
  MOD_RES (20)..(20): Xaa is Aib
  MISC_FEATURE (29)..(29): C-terminal amidation
YXEGTFTSDKSIYLDKQAAXEFVNWLLAG

SEQ ID NO: 1129 - protein, 29 aa, Artificial Sequence
  Synthetic polypeptide
  MOD_RES (2)..(2): Xaa is Aib
  MISC_FEATURE (10)..(10): 16 Carbon fatty acyl group covalently attached to Lysine
  MOD_RES (20)..(20): Xaa is Aib
  MISC_FEATURE (29)..(29): C-terminal amidation
YXEGTFTSDKSIYLDKQAAXEFVNWLLAG

SEQ ID NO: 1130 - protein, 29 aa, Artificial Sequence
  Synthetic polypeptide
  MOD_RES (2)..(2): Xaa is Aib
  MISC_FEATURE (10)..(10): 18 Carbon fatty acyl group covalently attached to Lysine
  MOD_RES (20)..(20): Xaa is Aib
  MISC_FEATURE (29)..(29): C-terminal amidation
YXEGTFTSDKSIYLDKQAAXEFVNWLLAG

SEQ ID NO: 1131 - protein, 29 aa, Artificial Sequence
  Synthetic polypeptide
  MOD_RES (2)..(2): Xaa is Aib
  MOD_RES (20)..(20): Xaa is Aib
  MISC_FEATURE (29)..(29): C-terminal amidation
YXEGTFTSDKSIYLDKQAAXEFVNWLLAG

SEQ ID NO: 1132 - protein, 40 aa, Artificial Sequence; identical to SEQ ID NO: 766
  Synthetic polypeptide
  MOD_RES (2)..(2): Xaa is Aib
  MOD_RES (20)..(20): Xaa is Aib
  MISC_FEATURE (40)..(40): 14 Carbon fatty acyl group covalently attached to Lysine
  MISC_FEATURE (40)..(40): C-terminal amidation

SEQ ID NO: 1133 - protein, 40 aa, Artificial Sequence; identical to SEQ ID NO: 766
  Synthetic polypeptide
  MOD_RES (2)..(2): Xaa is Aib
  MOD_RES (20)..(20): Xaa is Aib
  MISC_FEATURE (40)..(40): 16 Carbon fatty acyl group covalently attached to Lysine
  MISC_FEATURE (40)..(40): C-terminal amidation

SEQ ID NO: 1134 - protein, 40 aa, Artificial Sequence; identical to SEQ ID NO: 766
  Synthetic polypeptide
  MOD_RES (2)..(2): Xaa is Aib
  MOD_RES (20)..(20): Xaa is Aib
  MISC_FEATURE (40)..(40): 18 Carbon fatty acyl group covalently attached to Lysine
  MISC_FEATURE (40)..(40): C-terminal amidation

SEQ ID NO: 1135 - protein, 40 aa, Artificial Sequence; identical to SEQ ID NO: 766
  Synthetic polypeptide
  MOD_RES (2)..(2): Xaa is Aib
  MOD_RES (20)..(20): Xaa is Aib
  MISC_FEATURE (40)..(40): C-terminal amidation

SEQ ID NO: 1136 - protein, 40 aa, Artificial Sequence; identical to SEQ ID NO: 766
  Synthetic polypeptide
  MOD_RES (2)..(2): Xaa is Aib
  MOD_RES (20)..(20): Xaa is Aib
  MISC_FEATURE (24)..(24): PEG (40kDa) covalently attached to Cysteine
  MISC_FEATURE (40)..(40): 14 Carbon fatty acyl group covalently attached to Lysine
  MISC_FEATURE (40)..(40): C-terminal amidation

SEQ ID NO: 1137 - protein, 40 aa, Artificial Sequence; identical to SEQ ID NO: 766
  Synthetic polypeptide
  MOD_RES (2)..(2): Xaa is Aib
  MOD_RES (20)..(20): Xaa is Aib
  MISC_FEATURE (24)..(24): PEG (40kDa) covalently attached to Cysteine
  MISC_FEATURE (40)..(40): 16 Carbon fatty acyl group covalently attached to Lysine
  MISC_FEATURE (40)..(40): C-terminal amidation

SEQ ID NO: 1138 - protein, 40 aa, Artificial Sequence; identical to SEQ ID NO: 766
  Synthetic polypeptide
  MOD_RES (2)..(2): Xaa is Aib
  MOD_RES (20)..(20): Xaa is Aib
  MISC_FEATURE (24)..(24): PEG (40kDa) covalently attached to Cysteine
  MISC_FEATURE (40)..(40): 18 Carbon fatty acyl group covalently attached to Lysine
  MISC_FEATURE (40)..(40): C-terminal amidation

SEQ ID NO: 1139 - protein, 40 aa, Artificial Sequence; identical to SEQ ID NO: 766
  Synthetic polypeptide
  MOD_RES (2)..(2): Xaa is Aib
  MOD_RES (20)..(20): Xaa is Aib
  MISC_FEATURE (24)..(24): PEG (40kDa) covalently attached to Cysteine
  MISC_FEATURE (40)..(40): C-terminal amidation

SEQ ID NO: 1140 - protein, 40 aa, Artificial Sequence; identical to SEQ ID NO: 760
  Synthetic polypeptide
  MOD_RES (2)..(2): Xaa is Aib
  MOD_RES (20)..(20): Xaa is Aib
  MISC_FEATURE (40)..(40): PEG (40kDa) covalently attached to Cysteine
  MISC_FEATURE (40)..(40): C-terminal amidation

SEQ ID NO: 1141 - protein, 40 aa, Artificial Sequence; identical to SEQ ID NO: 759
  Synthetic polypeptide
  MOD_RES (2)..(2): Xaa is Aib
  MOD_RES (20)..(20): Xaa is Aib
  MISC_FEATURE (40)..(40): 16 Carbon fatty acyl group covalently attached to Lysine
  MISC_FEATURE (40)..(40): C-terminal amidation

SEQ ID NO: 1142 - protein, 40 aa, Artificial Sequence
  Synthetic polypeptide
  MOD_RES (2)..(2): Xaa is Aib
  MOD_RES (20)..(20): Xaa is Aib
  MISC_FEATURE (40)..(40): 16 Carbon fatty acyl group covalently attached to Lysine
  MISC_FEATURE (40)..(40): C-terminal amidation
YXQGTFTSDYSIYLDKQAAXEFVCWLMNGGPSSGAPPPSK

SEQ ID NO: 1143 - protein, 40 aa, Artificial Sequence; identical to SEQ ID NO: 1142
  Synthetic polypeptide
  MOD_RES (2)..(2): Xaa is Aib
  MOD_RES (20)..(20): Xaa is Aib
  MISC_FEATURE (24)..(24): PEG (40kDa) covalently attached to Cysteine
  MISC_FEATURE (40)..(40): 16 Carbon fatty acyl group covalently attached to Lysine
  MISC_FEATURE (40)..(40): C-terminal amidation

SEQ ID NO: 1144 - protein, 40 aa, Artificial Sequence; identical to SEQ ID NO: 759
  Synthetic polypeptide
  MOD_RES (2)..(2): Xaa is Aib
  MOD_RES (20)..(20): Xaa is Aib
  MISC_FEATURE (40)..(40): 14 Carbon fatty acyl group covalently attached to Lysine
  MISC_FEATURE (40)..(40): C-terminal amidation

SEQ ID NO: 1145 - protein, 40 aa, Artificial Sequence; identical to SEQ ID NO: 759
  Synthetic polypeptide
  MOD_RES (2)..(2): Xaa is Aib
  MOD_RES (20)..(20): Xaa is Aib
  MISC_FEATURE (40)..(40): 18 Carbon fatty acyl group covalently attached to Lysine
  MISC_FEATURE (40)..(40): C-terminal amidation

SEQ ID NO: 1146 - protein, 40 aa, Artificial Sequence; identical to SEQ ID NO: 759
  Synthetic polypeptide
  MOD_RES (2)..(2): Xaa is Aib
  MOD_RES (20)..(20): Xaa is Aib
  MISC_FEATURE (40)..(40): C-terminal amidation

SEQ ID NO: 1147 - protein, 40 aa, Artificial Sequence; identical to SEQ ID NO: 756
  Synthetic polypeptide
  MOD_RES (2)..(2): Xaa is Aib
  MOD_RES (20)..(20): Xaa is Aib
  MISC_FEATURE (40)..(40): 3-SH-propionic acyl group covalently attached to Lysine
  MISC_FEATURE (40)..(40): C-terminal amidation

SEQ ID NO: 1148 - protein, 40 aa, Artificial Sequence; identical to SEQ ID NO: 1123
  Synthetic polypeptide
  MOD_RES (2)..(2): Xaa is Aib
  MOD_RES (20)..(20): Xaa is Aib
  MISC_FEATURE (40)..(40): 8 Carbon fatty acyl group covalently attached to Lysine
  MISC_FEATURE (40)..(40): C-terminal amidation

SEQ ID NO: 1149 - protein, 40 aa, Artificial Sequence
  Synthetic polypeptide
  MOD_RES (2)..(2): Xaa is Aib
  MOD_RES (20)..(20): Xaa is Aib
  MISC_FEATURE (40)..(40): C-terminal amidation
YXQGTFSSDYSIYLDKQAAXEFVNWLLAGGPSSGAPPPSC

SEQ ID NO: 1150 - protein, 40 aa, Artificial Sequence
  Synthetic polypeptide
  MOD_RES (2)..(2): Xaa is Aib
  MOD_RES (7)..(7): Xaa is 2-aminobutyric acid
  MOD_RES (20)..(20): Xaa is Aib
  MISC_FEATURE (40)..(40): C-terminal amidation
YXQGTFXSDYSIYLDKQAAXEFVNWLLAGGPSSGAPPPSC

SEQ ID NO: 1151 - protein, 40 aa, Artificial Sequence; identical to SEQ ID NO: 766
  Synthetic polypeptide
  MOD_RES (2)..(2): Xaa is Aib
  MOD_RES (20)..(20): Xaa is Aib
  MISC_FEATURE (40)..(40): 8 Carbon fatty acyl group covalently attached to Lysine
  MISC_FEATURE (40)..(40): C-terminal amidation

SEQ ID NO: 1152 - protein, 40 aa, Artificial Sequence; identical to SEQ ID NO: 759
  Synthetic polypeptide
  MOD_RES (2)..(2): Xaa is Aib
  MOD_RES (20)..(20): Xaa is Aib
  MISC_FEATURE (40)..(40): 8 Carbon fatty acyl group covalently attached to Lysine
  MISC_FEATURE (40)..(40): C-terminal amidation

SEQ ID NO: 1153 - protein, 40 aa, Artificial Sequence; identical to SEQ ID NO: 759
  Synthetic polypeptide
  MOD_RES (2)..(2): Xaa is Aib
  MOD_RES (20)..(20): Xaa is Aib
  MISC_FEATURE (24)..(24): PEG (40kDa) covalently attached to Cysteine
  MISC_FEATURE (40)..(40): C-terminal amidation

SEQ ID NO: 1154 - protein, 40 aa, Artificial Sequence
  Synthetic polypeptide
  MOD_RES (2)..(2): Xaa is Aib
  MOD_RES (20)..(20): Xaa is Aib
  MOD_RES (40)..(40): Xaa is d-Lysine
  MISC_FEATURE (40)..(40): 14 Carbon fatty acyl group covalently attached to d-Lysine
  MISC_FEATURE (40)..(40): C-terminal amidation
YXEGTFTSDYSIYLDKQAAXEFVCWLLAGGPSSGAPPPSX

SEQ ID NO: 1155 - protein, 40 aa, Artificial Sequence; identical to SEQ ID NO: 1154
  Synthetic polypeptide
  MOD_RES (2)..(2): Xaa is Aib
  MOD_RES (20)..(20): Xaa is Aib
  MOD_RES (40)..(40): Xaa is d-Lysine
  MISC_FEATURE (40)..(40): C-terminal amidation

SEQ ID NO: 1156 - protein, 40 aa, Artificial Sequence; identical to SEQ ID NO: 1154
  Synthetic polypeptide
  MOD_RES (2)..(2): Xaa is Aib
  MOD_RES (20)..(20): Xaa is Aib
  MISC_FEATURE (24)..(24): PEG (40kDa) covalently attached to Cysteine
  MOD_RES (40)..(40): Xaa is d-Lysine
  MISC_FEATURE (40)..(40): 14 Carbon fatty acyl group covalently attached to Lysine
  MISC_FEATURE (40)..(40): C-terminal amidation

SEQ ID NO: 1157 - protein, 40 aa, Artificial Sequence; identical to SEQ ID NO: 1154
  Synthetic polypeptide
  MOD_RES (2)..(2): Xaa is Aib
  MOD_RES (20)..(20): Xaa is Aib
  MISC_FEATURE (24)..(24): PEG (40kDa) covalently attached to Cysteine
  MISC_FEATURE (40)..(40): Xaa is d-Lysine
  MISC_FEATURE (40)..(40): C-terminal amidation

SEQ ID NO: 1158 - protein, 39 aa, Artificial Sequence
  Synthetic polypeptide
  MOD_RES (2)..(2): Xaa is Aib
  MISC_FEATURE (10)..(10): 14 Carbon fatty acyl group covalently attached to Lysine
  MOD_RES (20)..(20): Xaa is Aib
  MISC_FEATURE (40)..(40): C-terminal amidation
YXEGTFTSDKSIYLDKQAAXEFVCWLLAGGPSSGAPPPS

SEQ ID NO: 1159 - protein, 39 aa, Artificial Sequence; identical to SEQ ID NO: 1158
  Synthetic polypeptide
  MOD_RES (2)..(2): Xaa is Aib
  MOD_RES (20)..(20): Xaa is Aib
  MISC_FEATURE (40)..(40): C-terminal amidation

SEQ ID NO: 1160 - protein, 41 aa, Artificial Sequence
  Synthetic polypeptide
  MOD_RES (2)..(2): Xaa is Aib
  MOD_RES (20)..(20): Xaa is Aib
  MISC_FEATURE (40)..(40): 14 Carbon fatty acyl group covalently attached to Lysine
  MISC_FEATURE (41)..(41): C-terminal amidation
YXEGTFTSDYSIYLDKQAAXEFVNWLLAGGPSSGAPPPSKC

SEQ ID NO: 1161 - protein, 41 aa, Artificial Sequence; identical to SEQ ID NO: 1160
  Synthetic polypeptide
  MOD_RES (2)..(2): Xaa is Aib
  MOD_RES (20)..(20): Xaa is Aib
  MISC_FEATURE (41)..(41): C-terminal amidation

SEQ ID NO: 1162 - protein, 39 aa, Artificial Sequence; identical to SEQ ID NO: 1158
  Synthetic polypeptide
  MOD_RES (2)..(2): Xaa is Aib
  MISC_FEATURE (10)..(10): 14 Carbon fatty acyl group covalently attached to Lysine
  MOD_RES (20)..(20): Xaa is Aib
  MISC_FEATURE (24)..(24): PEG (40kDa) covalently attached to Cysteine
  MISC_FEATURE (39)..(39): C-terminal amidation

SEQ ID NO: 1163 - protein, 41 aa, Artificial Sequence; identical to SEQ ID NO: 1160
  Synthetic polypeptide
  MOD_RES (2)..(2): Xaa is Aib
  MOD_RES (20)..(20): Xaa is Aib
  MISC_FEATURE (40)..(40): 14 Carbon fatty acyl group covalently attached to Lysine
  MISC_FEATURE (41)..(41): PEG (40kDa) covalently attached to Cysteine
  MISC_FEATURE (41)..(41): C-terminal amidation

SEQ ID NO: 1164 - protein, 41 aa, Artificial Sequence; identical to SEQ ID NO: 1160
  Synthetic polypeptide
  MOD_RES (2)..(2): Xaa is Aib
  MOD_RES (20)..(20): Xaa is Aib
  MISC_FEATURE (41)..(41): PEG (40kDa) covalently attached to Cysteine
  MISC_FEATURE (41)..(41): C-terminal amidation

SEQ ID NO: 1165 - protein, 40 aa, Artificial Sequence
  Synthetic polypeptide
  MOD_RES (2)..(2): Xaa is Aib
  MISC_FEATURE (40)..(40): 14 Carbon fatty acyl group covalently attached to Lysine
  MISC_FEATURE (40)..(40): C-terminal amidation
HXQGTFTSDYSKYLDEQAAKEFICWLMNGGPSSGAPPPSK

SEQ ID NO: 1166 - protein, 40 aa, Artificial Sequence; identical to SEQ ID NO: 759
  Synthetic polypeptide
  MOD_RES (2)..(2): Xaa is Aib
  MOD_RES (20)..(20): Xaa is Aib
  MISC_FEATURE (24)..(24): PEG (40kDa) covalently attached to Cysteine
  MISC_FEATURE (40)..(40): 14 Carbon fatty acyl group covalently attached to Lysine
  MISC_FEATURE (40)..(40): C-terminal amidation

SEQ ID NO: 1167 - protein, 40 aa, Artificial Sequence
  Synthetic polypeptide
  MOD_RES (2)..(2): Xaa is Aib
  MOD_RES (16)..(16): Xaa is Aib
  MISC_FEATURE (40)..(40): C-terminal amidation
YXQGTFTSDYSIYLDXQAAKEFVNWLLAGGPSSGAPPPSC

SEQ ID NO: 1168 - protein, 40 aa, Artificial Sequence
  Synthetic polypeptide
  MOD_RES (2)..(2): Xaa is Aib
  MOD_RES (16)..(16): Xaa is Aib
  MISC_FEATURE (40)..(40): C-terminal amidation
YXQGTFTSDYSIYLDXQAAQEFVNWLLAGGPSSGAPPPSC

SEQ ID NO: 1169 - protein, 40 aa, Artificial Sequence
  Synthetic polypeptide
  MOD_RES (2)..(2): Xaa is Aib
  MOD_RES (12)..(16): Lactam bridge between residues 12 and 16
  MOD_RES (20)..(20): Xaa is Aib
  MOD_RES (40)..(40): C-terminal amidation
YXQGTFTSDYSKYLDEQAAXEFVNWLLAGGPSSGAPPPSC

SEQ ID NO: 1170 - protein, 10 aa, Artificial Sequence
  Synthetic polypeptide
GPSSGAPPPK

SEQ ID NO: 1171 - protein, 11 aa, Artificial Sequence
  Synthetic polypeptide
  MOD_RES (1)..(1): Xaa is Gly or a small, aliphatic or non-polar or slightly polar amino acid
XGPSSGAPPPK

SEQ ID NO: 1172 - protein, 12 aa, Artificial Sequence
  Synthetic  polypeptide
  MOD_RES (1)..(1): Xaa is Gly or a small, aliphatic or non-polar or slightly polar amino acid
XGPSSGAPPPSK

SEQ ID NO: 1173 - protein, 40 aa, Artificial Sequence; identical to SEQ ID NO: 1167
  Synethic polypeptide
  MOD_RES (2)..(2): Xaa is Aib
  MOD_RES (16)..(16): Xaa is Aib
  MISC_FEATURE (40)..(40): PEG (40kDa) covalently attached to Cysteine
  MISC_FEATURE (40)..(40): C-terminal amidation

SEQ ID NO: 1174 - protein, 40 aa, Artificial Sequence; identical to SEQ ID NO: 1168
  Synthetic polypeptide
  MOD_RES (2)..(2): Xaa is Aib
  MOD_RES (16)..(16): Xaa is Aib
  MISC_FEATURE (40)..(40): PEG (40kDa) covalently attached to Cysteine
  MISC_FEATURE (40)..(40): C-terminal amidation

SEQ ID NO: 1175 - protein, 40 aa, Artificial Sequence; identical to SEQ ID NO: 1121
  Synthetic polypeptide
  MOD_RES (2)..(2): Xaa is Aib
  MOD_RES (16)..(16): Xaa is Aib
  MOD_RES (20)..(20): Xaa is Aib
  MISC_FEATURE (40)..(40): C-terminal amidation

SEQ ID NO: 1176 - protein, 40 aa, Artificial Sequence
  Synthetic polypeptide
  MOD_RES (2)..(2): Xaa is Aib
  MOD_RES (20)..(20): Xaa is Aib
  MISC_FEATURE (40)..(40): C-terminal amidation
YXQGTFTSDYSIYLDEQAAXEFVNWLLAGGPSSGAPPPSC

SEQ ID NO: 1177 - protein, 29 aa, Artificial Sequence
  Synthetic polypeptide
  MOD_RES (2)..(2): Xaa is Aib
  MOD_RES (20)..(20): Xaa is Aib
  MISC_FEATURE (29)..(29): C-terminal amidation
YXQGTFTSDYSIYLDEQAAXEFVCWLLAG

SEQ ID NO: 1178 - protein, 29 aa, Artificial Sequence
  Synthetic polypeptide
  MISC_FEATURE: C-terminal amidation
  MOD_RES (2)..(2): Xaa is Aib
  MOD_RES (20)..(20): Xaa is Aib
YXQGTFTSDYSIYLDSQAAXEFVCWLLAG

SEQ ID NO: 1179 - protein, 30 aa, Artificial Sequene
  Synthetic polypeptide
  MOD_RES (2)..(2): Xaa is Aib
  MISC_FEATURE (24)..(24): PEG (40kDa) covalently attached to Cysteine
HXEGTFTSDVSSYLEEQAAKEFICWLVKGR

SEQ ID NO: 1180 - protein, 42 aa, Artificial Sequence
  Synthetic polypeptide
  MISC_FEATURE (24)..(24): Substituted amino acid covalently linked to hydrophilic group
YAPGTFISDYSIAMDKIHQQDFVXWLLAQKGKKNWLKHNITQ

SEQ ID NO: 1181 - protein, 40 aa, Artificial Sequence
  Synthetic polypeptide
  MOD_RES (2)..(2): Xaa is Aib
  MISC_FEATURE (16)..(20): Lactam bridge between residues 16 and 20
  MISC_FEATURE (40)..(40): Substituted amino acid covalentaly linked to hydrophilic group
YXQGTFTSDYSIYLDEQAAKEFVNWLLAGGPSSGAPPPSX

SEQ ID NO: 1182 - protein, 29 aa, Artificial Sequence
  Synthetic polypeptide
  MOD_RES (2)..(2): Xaa is Aib
  MISC_FEATURE (16)..(20): Lactam bridge between residues 16 and 20
  MISC_FEATURE (24)..(24): Substituted amino acid covalently linked to hydrophilic group
  misc_feature (29)..(29): Xaa can be any naturally occurring amino acid
YXQGTFTSDYSIYLDEQAAKEFVXWLLAX

SEQ ID NO: 1183 - protein, 39 aa, Artificial Sequence
  Synthetic polypeptide
  MOD_RES (2)..(2): Xaa is Aib
  MISC_FEATURE (16)..(20): Lactam bridge between residues 16 and 20
  MISC_FEATURE (24)..(24): Substituted amino acid covalently linked to hydrophilic group
YXQGTFTSDYSIYLDEQAAKEFVXWLLAGGPSSGAPPPS

SEQ ID NO: 1184 - protein, 40 aa, Artificial Sequence
  Synthetic polypeptide
  MOD_RES (2)..(2): Xaa is Aib
  MISC_FEATURE (16)..(20): Lactam bridge between residues 16 and 20
  MISC_FEATURE (40)..(40): Substituted amino acid covalently linked to hydrophilic group
YXEGTFTSDYSIYLDEQAAKEFVNWLLAGGPSSGAPPPSX

SEQ ID NO: 1185 - protein, 29 aa, Artificial Sequence
  Sythetic polypeptide
  MOD_RES (2)..(2): Xaa is Aib
  MISC_FEATURE (16)..(20): Lactam bridge between residues 16 and 20
  MISC_FEATURE (24)..(24): Substituted amino acid covalently linked to hydrophilic group
YXQGTFISDYSIYLDEQAAKEFVXWLLAG

SEQ ID NO: 1186 - protein, 40 aa, Artificial Sequence
  Synthetic polypeptide
  MOD_RES (2)..(2): Xaa is Aib
  MISC_FEATURE (16)..(20): Lactam bridge between residues 16 and 20
  MISC_FEATURE (40)..(40): Substituted amino acid covalently linked to hydrophilic group
YXQGTFISDYSIYLDEQAAKEFVNWLLAGGPSSGAPPPSX

SEQ ID NO: 1187 - protein, 29 aa, Artificial sequence
  Synthetic polypeptide
  MOD_RES (2)..(2): Xaa is Aib
  MISC_FEATURE (16)..(20): Lactam bridge between residues 16 and 20
  MISC_FEATURE (24)..(24): Substituted amino acid covalently linked to hydrophilic group
YXQGTFTSDYSIYLDEQAAKEFVXWLMNG

SEQ ID NO: 1188 - protein, 40 aa, Artificial sequence
  Synthetic polypeptide
  MOD_RES (2)..(2): Xaa is Aib
  MISC_FEATURE (16)..(20): Lactam bridge between residues 16 and 20
  MISC_FEATURE (40)..(40): Substitute amino acid covalently linked to hydrophilic group
YXQGTFVSDYSIYLDEQAAKEFVNWLLAGGPSSGAPPPSX

SEQ ID NO: 1189 - protein, 40 aa, Artificial sequence
  Synthetic polypeptide
  MOD_RES (2)..(2): Xaa is Aib
  MISC_FEATURE (16)..(20): Lactam bridge between residues 16 and 20
  MOD_RES (27)..(27): Xaa is Nle
  MISC_FEATURE (40)..(40): Substituted amino acid covalently linked to hydrophilic group
YXQGTFTSDYSIYLDEQAAKEFVNWLXAGGPSSGAPPPSX

SEQ ID NO: 1190 - protein, 40 aa, Artificial sequence
  Synthetic polypeptide
  MOD_RES (2)..(2): Xaa is Aib
  MISC_FEATURE (16)..(20): Lactam bridge between residues 16 and 20
  MISC_FEATURE (40)..(40): Substituted amino acid covalently linked to hydrophilic group
YXEGTFTSDYSIYLDEQAAKEFVNWLLAGRPSSGAPPPSX

SEQ ID NO: 1191 - protein, 43 aa, Artificial sequence
  Synthetic polypeptide
  MOD_RES (2)..(2): Xaa is Aib
  MISC_FEATURE (16)..(20): Lactam bridge between residues 16 and 20
  MISC_FEATURE (43)..(43): Substituted amino acid covalently linked to hydrophilic group
YXEGTFTSDYSIYLDEQAAKEFVNWLLAGKGKKNWLKHNITQX

SEQ ID NO: 1192 - protein, 40 aa, Artificial Sequence
  Synthetic polypeptide
  MOD_RES (2)..(2): Xaa is Aib
  MOD_RES (20)..(20): Xaa is Aib
  MISC_FEATURE (40)..(40): Substituted amino acid covalently linked to hydrophilic group
  MISC_FEATURE (40)..(40): C-terminal amidation
YXEGTFTSDYSIYLDKQAAXEFVNWLLAGGPSSGAPPPSX

SEQ ID NO: 1193 - protein, 40 aa, Artificial Sequence
  Synthetic polypeptide
  MOD_RES (2)..(2): Xaa is Aib
  MOD_RES (20)..(20): Xaa is Aib
  MISC_FEATURE (24)..(24): Substituted amino acid covalently linked to hydrophilic group
  MISC_FEATURE (40)..(40): C-terminal amidation
YXEGTFTSDYSIYLDKQAAXEFVXWLLAGGPSSGAPPPSK

SEQ ID NO: 1194 - protein, 40 aa, Artificial Sequence
  Synthetic polypeptide
  MOD_RES (2)..(2): Xaa is Aib
  MOD_RES (20)..(20): Xaa is Aib
  MISC_FEATURE (24)..(24): Substituted amino acid covalently linked to hydrophilic group
  MISC_FEATURE (40)..(40): Substitute amino acid covalently linked to an acyl or alkyl group
  MISC_FEATURE (40)..(40): C-terminal amidation
YXEGTFTSDYSIYLDKQAAXEFVXWLLAGGPSSGAPPPSX

SEQ ID NO: 1195 - protein, 40 aa, Artificial Sequence; identical to SEQ ID NO: 1192
  Synthetic polypeptide
  MOD_RES (2)..(2): Xaa is Aib
  MOD_RES (20)..(20): Xaa is Aib
  MISC_FEATURE (40)..(40): Substituted amino acid covalently linked to an acyl or alkyl group
  MISC_FEATURE (40)..(40): C-terminal amidation

SEQ ID NO: 1196 - protein, 40 aa, Artificial Sequence
  Synthetic polypeptide
  MOD_RES (2)..(2): Xaa is Aib
  MOD_RES (20)..(20): Xaa is Aib
  MISC_FEATURE (40)..(40): Substituted amino acid covalently linked to hydrophilic group
  MISC_FEATURE (40)..(40): C-terminal amidation
YXQGTFTSDYSIYLDKQAAXEFVNWLLAGGPSSGAPPPSX

SEQ ID NO: 1197 - protein, 39 aa, Artificial Sequence
  Synthetic polypeptide
  MOD_RES (2)..(2): Xaa is Aib
  MOD_RES (20)..(20): Xaa is Aib
  MISC_FEATURE (24)..(24): Substituted amino acid covalently linked to acyl or alkyl group
  MISC_FEATURE (39)..(39): C-terminal amidation
YXEGTFTSDYSIYLDKQAAXEFVXWLLAGGPSSGAPPPS

SEQ ID NO: 1198 - protein, 39 aa, Artificial Sequence
  Synthetic polypeptide
  MOD_RES (2)..(2): Xaa is Aib
  MISC_FEATURE (10)..(10): Substituted amino acid covalently linked to acyl or alkyl group
  MOD_RES (20)..(20): Xaa is Aib
  MISC_FEATURE (39)..(39): C-terminal amidation
YXEGTFTSDXSIYLDKQAAXEFVNWLLAGGPSSGAPPPS

SEQ ID NO: 1199 - protein, 40 aa, Artificial Sequence; identical to SEQ ID NO: 1196
  Synthetic polypeptide
  MOD_RES (2)..(2): Xaa is Aib
  MOD_RES (20)..(20): Xaa is Aib
  MISC_FEATURE (40)..(40): Substituted amino acid covalently linked to acyl or alkyl group
  MISC_FEATURE (40)..(40): C-terminal amidation

SEQ ID NO: 1200 - protein, 29 aa, Artificial Sequence
  Synthetic polypeptide
  MOD_RES (2)..(2): Xaa is Aib
  MOD_RES (20)..(20): Xaa is Aib
  MISC_FEATURE (24)..(24): Substituted amino acid covalently linked to hydrophilic group
  MISC_FEATURE (29)..(29): C-terminal amidation
YXQGTFTSDYSIYLDKQAAXEFVXWLLAG

SEQ ID NO: 1201 - protein, 29 aa, Artificial Sequence
  Synthetic polypeptide
  MOD_RES (2)..(2): Xaa is Aib
  MISC_FEATURE (10)..(10): Substituted amino acid covalently linked to acyl or alkyl group
  MOD_RES (20)..(20): Xaa is Aib
  MISC_FEATURE (29)..(29): C-terminal amidation
YXEGTFTSDXSIYLDKQAAXEFVNWLLAG

SEQ ID NO: 1202 - protein, 40 aa, Artificial Sequence
  Synthetic polypeptide
  MOD_RES (2)..(2): Xaa is Aib
  MOD_RES (20)..(20): Xaa is Aib
  MISC_FEATURE (40)..(40): Substituted amino acid covalently linked acyl or alkyl group
  MISC_FEATURE (40)..(40): C-terminal amidation
YXQGTFTSDYSIYLDKQAAXEFVCWLLAGGPSSGAPPPSX

SEQ ID NO: 1203 - protein, 40 aa, Artificial Sequence
  Synthetic polypeptide
  MOD_RES (2)..(2): Xaa is Aib
  MOD_RES (20)..(20): Xaa is Aib
  MISC_FEATURE (24)..(24): Substituted amino acid covalently linked to hydrophilic group
  MISC_FEATURE (40)..(40): Substituted amino acid covalently linked to acyl or alkyl group
  MISC_FEATURE (40)..(40): C-terminal amidation
YXQGTFTSDYSIYLDKQAAXEFVXWLLAGGPSSGAPPPSX

SEQ ID NO: 1204 - protein, 40 aa, Artificial Sequence
  Synthetic polypeptide
  MOD_RES (2)..(2): Xaa is Aib
  MOD_RES (20)..(20): Xaa is Aib
  MISC_FEATURE (24)..(24): Substituted amino acid covalently linked to hydrophilic group
  MISC_FEATURE (40)..(40): C-terminal amidation
YXQGTFTSDYSIYLDKQAAXEFVXWLLAGGPSSGAPPPSK

SEQ ID NO: 1205 - protein, 40 aa, Artificial Sequence; identical to SEQ ID NO: 1192
  Synthetic polypeptide
  MOD_RES (2)..(2): Xaa is Aib
  MOD_RES (20)..(20): Xaa is Aib
  MISC_FEATURE (40)..(40): Substituted amino acid covalently linked to hydrophilic group
  MISC_FEATURE (40)..(40): C-terminal amidation

SEQ ID NO: 1206 - protein, 40 aa, Artificial Sequence; identical to SEQ ID NO: 1154
  Synthetic polypeptide
  MOD_RES (2)..(2): Xaa is Aib
  MOD_RES (20)..(20): Xaa is Aib
  MISC_FEATURE (40)..(40): Substituted amino acid covalently linked to acyl or alkyl group
  MISC_FEATURE (40)..(40): C-terminal amidation

SEQ ID NO: 1207 - protein, 40 aa, Artificial Sequence
  Synthetic polypeptide
  MOD_RES (2)..(2): Xaa is Aib
  MOD_RES (20)..(20): Xaa is Aib
  MISC_FEATURE (40)..(40): Substituted amino acid covalently linked to acyl or alkyl group
  MISC_FEATURE (40)..(40): C-terminal amidation
YXQGTFTSDYSIYLDKQAAXEFVCWLMNGGPSSGAPPPSX

SEQ ID NO: 1208 - protein, 40 aa, Artificial Sequence
  Synthetic polypeptide
  MOD_RES (2)..(2): Xaa is Aib
  MOD_RES (20)..(20): Xaa is Aib
  MISC_FEATURE (24)..(24): Substituted amino acid covalently linked to hydrophilic group
  MISC_FEATURE (40)..(40): Substituted amino acid covalently linked to acyl or alkyl group
  MISC_FEATURE (40)..(40): C-terminal amidation
YXQGTFTSDYSIYLDKQAAXEFVXWLMNGGPSSGAPPPSX

SEQ ID NO: 1209 - protein, 40 aa, Artificial Sequence; identical to SEQ ID NO: 1154
  Synthetic polypeptide
  MOD_RES (2)..(2): Xaa is Aib
  MOD_RES (20)..(20): Xaa is Aib
  MISC_FEATURE (40)..(40): Substituted amino acid covalently linked to acyl or alkyl group
  MISC_FEATURE (40)..(40): C-terminal amidation

SEQ ID NO: 1210 - protein, 40 aa, Artificial Sequence; identical to SEQ ID NO: 1196
  Synthetic polypeptide
  MOD_RES (2)..(2): Xaa is Aib
  MOD_RES (20)..(20): Xaa is Aib
  MISC_FEATURE (40)..(40): Substituted amino acid covalently linked to acyl or alkyl group
  MISC_FEATURE (40)..(40): C-terminal amidation

SEQ ID NO: 1211 - protein, 40 aa, Artificial Sequence; identical to SEQ ID NO: 1202
  Synthetic polypeptide
  MOD_RES (2)..(2): Xaa is Aib
  MOD_RES (20)..(20): Xaa is Aib
  MISC_FEATURE (40)..(40): Substituted amino acid covalently linked to acyl or alkyl group
  MISC_FEATURE (40)..(40): C-terminal amidation

SEQ ID NO: 1212 - protein, 40 aa, Artificial Sequence; identical to SEQ ID NO: 1154
  Synthetic polypeptide
  MOD_RES (2)..(2): Xaa is Aib
  MOD_RES (20)..(20): Xaa is Aib
  MISC_FEATURE (40)..(40): Substituted amino acid covalently linked to acyl or alkyl group
  MISC_FEATURE (40)..(40): C-terminal amidation

SEQ ID NO: 1213 - protein, 40 aa, Artificial Sequence; identical to SEQ ID NO: 1193
  Synthetic polypeptide
  MOD_RES (2)..(2): Xaa is Aib
  MOD_RES (20)..(20): Xaa is Aib
  MISC_FEATURE (24)..(24): Substituted amino acid covalently linked to hydrophilic group
  MISC_FEATURE (40)..(40): C-terminal amidation

SEQ ID NO: 1214 - protein, 40 aa, Artificial Sequence; identical to SEQ ID NO: 1154
  Synthetic polypeptide
  MOD_RES (2)..(2): Xaa is Aib
  MOD_RES (20)..(20): Xaa is Aib
  MISC_FEATURE (40)..(40): Substituted amino acid covalently linked to acyl or alkyl group
  MISC_FEATURE (40)..(40): C-terminal amidation

SEQ ID NO: 1215 - protein, 40 aa, Artificial Sequence; identical to SEQ ID NO: 1194
  Synthetic polypeptide
  MOD_RES (2)..(2): Xaa is Aib
  MOD_RES (20)..(20): Xaa is Aib
  MISC_FEATURE (24)..(24): Substituted amino acid covalently linked to hydrophilic group
  MISC_FEATURE (40)..(40): Substituted amino acid covalently linked to acyl or alkyl group
  MISC_FEATURE (40)..(40): C-terminal amidation

SEQ ID NO: 1216 - protein, 40 aa, Artificial Sequence; identical to SEQ ID NO: 1194
  Synthetic polypeptide
  MOD_RES (2)..(2): Xaa is Aib
  MOD_RES (20)..(20): Xaa is Aib
  MISC_FEATURE (24)..(24): Substituted amino acid covalently linked to hydrophilic group
  MISC_FEATURE (40)..(40): C-terminal amidation

SEQ ID NO: 1217 - protein, 39 aa, Artificial Sequence
  Synthetic polypeptide
  MOD_RES (2)..(2): Xaa is Aib
  MISC_FEATURE (10)..(10): Substituted amino acid covalently linked to acyl or alkyl group
  MOD_RES (20)..(20): Xaa is Aib
  MISC_FEATURE (40)..(40): C-terminal amidation
YXEGTFTSDXSIYLDKQAAXEFVCWLLAGGPSSGAPPPS

SEQ ID NO: 1218 - protein, 41 aa, Artificial Sequence
  Synthetic polypeptide
  MOD_RES (2)..(2): Xaa is Aib
  MOD_RES (20)..(20): Xaa is Aib
  MISC_FEATURE (40)..(40): Substituted amino acid covalently linked to acyl or alkyl group
  MISC_FEATURE (41)..(41): C-terminal amidation
YXEGTFTSDYSIYLDKQAAXEFVNWLLAGGPSSGAPPPSXC

SEQ ID NO: 1219 - protein, 39 aa, Artificial Sequence
  Synthetic polypeptide
  MOD_RES (2)..(2): Xaa is Aib
  MISC_FEATURE (10)..(10): Substituted amino acid covalently linked to acyl or alkyl group
  MOD_RES (20)..(20): Xaa is Aib
  MISC_FEATURE (24)..(24): Substituted amino acid covalently linked to hydrophilic group
  MISC_FEATURE (39)..(39): C-terminal amidation
YXEGTFTSDXSIYLDKQAAXEFVXWLLAGGPSSGAPPPS

SEQ ID NO: 1220 - protein, 41 aa, Artificial Sequence
  Synthetic polypeptide
  MOD_RES (2)..(2): Xaa is Aib
  MOD_RES (20)..(20): Xaa is Aib
  MISC_FEATURE (40)..(40): Substituted amino acid covalently linked to acyl or alkyl group
  MISC_FEATURE (41)..(41): Substituted amino acid covalently linked to hydrophilic group
  MISC_FEATURE (41)..(41): C-terminal amidation
YXEGTFTSDYSIYLDKQAAXEFVNWLLAGGPSSGAPPPSXX

SEQ ID NO: 1221 - protein, 41 aa, Artificial Sequence
  Synthetic polypeptide
  MOD_RES (2)..(2): Xaa is Aib
  MOD_RES (20)..(20): Xaa is Aib
  MISC_FEATURE (41)..(41): Substituted amino acid covalently linked to hydrophilic group
  MISC_FEATURE (41)..(41): C-terminal amidation
YXEGTFTSDYSIYLDKQAAXEFVNWLLAGGPSSGAPPPSKX

SEQ ID NO: 1222 - protein, 40 aa, Artificial Sequence
  Synthetic polypeptide
  MOD_RES (2)..(2): Xaa is Aib
  MISC_FEATURE (40)..(40): Substituted amino acid covalently linked to acyl or alkyl group
  MISC_FEATURE (40)..(40): C-terminal amidation
HXQGTFTSDYSKYLDEQAAKEFICWLMNGGPSSGAPPPSX

SEQ ID NO: 1223 - protein, 40 aa, Artificial Sequence; identical to SEQ ID NO: 1194
  Synthetic polypeptide
  MOD_RES (2)..(2): Xaa is Aib
  MOD_RES (20)..(20): Xaa is Aib
  MISC_FEATURE (24)..(24): Substituted amino acid covalently linked to hydrophilic group
  MISC_FEATURE (40)..(40): Substituted amino acid covalently linked to acyl or alkyl group
  MISC_FEATURE (40)..(40): C-terminal amidation

SEQ ID NO: 1224 - protein, 40 aa, Artificial Sequence
  Synethic polypeptide
  MOD_RES (2)..(2): Xaa is Aib
  MOD_RES (16)..(16): Xaa is Aib
  MISC_FEATURE (40)..(40): Substituted amino acid covalently linked to hydrophilic group
  MISC_FEATURE (40)..(40): C-terminal amidation
YXQGTFTSDYSIYLDXQAAKEFVNWLLAGGPSSGAPPPSX

SEQ ID NO: 1225 - protein, 40 aa, Artificial Sequence
  Synthetic polypeptide
  MOD_RES (2)..(2): Xaa is Aib
  MOD_RES (16)..(16): Xaa is Aib
  MISC_FEATURE (40)..(40): Substituted amino acid covalently linked to hydrophilic group
  MISC_FEATURE (40)..(40): C-terminal amidation
YXQGTFTSDYSIYLDXQAAQEFVNWLLAGGPSSGAPPPSX

SEQ ID NO: 1226 - protein, 30 aa, Artificial Sequene; identical to SEQ ID NO: 1179
  Synthetic polypeptide
  MOD_RES (2)..(2): Xaa is Aib
  MISC_FEATURE (24)..(24): Substituted amino acid covalently linked to hydrophilic group

SEQ ID NO: 1227 - protein, 29 aa, Artificial Sequence
  Synthetic polypeptide
  MOD_RES (2)..(2): Xaa is Aib
  MOD_RES (20)..(20): Xaa is Aib
  MISC_FEATURE (29)..(29): C-terminal amidation
YXQGTFTSDYSIYLDKQAAXEFVNWLLAG

SEQ ID NO: 1228 - protein, 29 aa, Artificial Sequence
  Synthetic polypeptide
  MOD_RES (2)..(2): Xaa is D-Ser, D-Ala, Val, Gly, N-Methyl Ser, N-Methyl Ala, or Aib
  MOD_RES (16)..(16): Xaa is Lys, Glu, Ser, Orn, Dab, Aib or any alpha, alpha-disubstituted amino acid
  MOD_RES (20)..(20): Xaa is any alpha, alpha-disubstituted amino acid
  MOD_RES (27)..(27): Xaa is Ile, Leu, or Nle
  MOD_RES (28)..(28): Xaa is Ala or Gly
  MOD_RES (29)..(29): Xaa is Thr, Ala, or Gly
  MISC_FEATURE (29)..(29): C-terminal amidation
YXQGTFTSDYSIYLDXQAAXEFVNWLXXX

SEQ ID NO: 1229 - protein, 29 aa, Artificial Sequence
  Synthetic polypeptide
  MOD_RES (2)..(2): Xaa is Aib
  MOD_RES (20)..(20): Xaa is Aib
  MISC_FEATURE (29)..(29): C-terminal amidation
YXQGTFTSDYSKYLDKRRAXDFVQWLLAG

SEQ ID NO: 1230 - protein, 29 aa, Artificial Sequence
  Synthetic polypeptide
  MOD_RES (2)..(2): Xaa is D-Ser, DAla, Val, Gly, N-Methyl Ser, N-Methyl Ala, or Aib
  MOD_RES (16)..(16): Xaa is Lys, Glu, Ser, Orn, Dab, Aib or any alpha, alpha-disubstituted amino acid
  MOD_RES (20)..(20): Xaa is any alpha, alpha-disubstituted amino acid
  MOD_RES (27)..(27): Xaa is Ile, Leu, or Nle
  MOD_RES (28)..(28): Xaa is Ala or Gly
  MOD_RES (29)..(29): Xaa is Thr, Ala, or Gly
  MOD_RES (29)..(29): C-terminal amidation
YXQGTFTSDYSKYLDXRRAXDFVQWLXXX

SEQ ID NO: 1231 - protein, 41 aa, Artificial Sequence; identical to SEQ ID NO: 1160
  Synthetic polypeptide
  MISC_FEATURE: Homodimer
  MOD_RES (2)..(2): Xaa is Aib
  MOD_RES (20)..(20): Xaa is Aib
  MISC_FEATURE (40)..(40): 14 Carbon fatty acyl group covalently bound to Lysine
  MOD_RES (40)..(40): C-terminal amidation
  DISULFID (41)..(41): Disulfide bond formed with Cys residue of a second peptide having the same structure.

SEQ ID NO: 1232 - protein, 40 aa, Artificial Sequence
  Synthetic polypeptide
  MOD_RES (2)..(2): Xaa is Aib
  MOD_RES (20)..(20): Xaa is Aib
  MISC_FEATURE (40)..(40): C-terminal amidation
YXQGTFTSDYSIYLDKQAAXEFVNWLMNGGPSSGAPPPSK

SEQ ID NO: 1233 - protein, 40 aa, Artificial Sequence
  Synthetic polypeptide
  MOD_RES (2)..(2): Xaa is Aib
  MOD_RES (20)..(20): Xaa is Aib
  MISC_FEATURE (40)..(40): C-terminal amidation
YXQGTFISDYSIYLDKQAAXEFVNWLLAGGPSSGAPPPSK

SEQ ID NO: 1234 - protein, 40 aa, Artificial Sequence; identical to SEQ ID NO: 1233
  Synthetic polypeptide
  MOD_RES (2)..(2): Xaa is Aib
  MOD_RES (20)..(20): Xaa is Aib
  MISC_FEATURE (40)..(40): 16 Carbon fatty acyl group covalently bound to Lysine
  MISC_FEATURE (40)..(40): C-terminal amidation

SEQ ID NO: 1235 - protein, 40 aa, Artificial Sequence; identical to SEQ ID NO: 756
  Synthetic polypeptide
  MOD_RES (2)..(2): Xaa is Aib
  MOD_RES (20)..(20): Xaa is Aib
  MISC_FEATURE (40)..(40): 16 Carbon fatty acyl group covalently bound to Lysine via a dipeptide spacer
  MISC_FEATURE (40)..(40): C-terminal amidation

SEQ ID NO: 1236 - protein, 40 aa, Artificial Sequence; identical to SEQ ID NO: 1123
  Synthetic polypeptide
  MOD_RES (2)..(2): Xaa is Aib
  MOD_RES (20)..(20): Xaa is Aib
  MISC_FEATURE (40)..(40): 16 Carbon fatty acyl group covalently bound to Lysine via a dipeptide spacer
  MISC_FEATURE (40)..(40): C-terminal amidation

SEQ ID NO: 1237 - protein, 40 aa, Artificial Sequence; identical to SEQ ID NO: 765
  Synthetic polypeptide
  MOD_RES (2)..(2): Xaa is Aib
  MISC_FEATURE (10)..(10): 16 Carbon fatty acyl group covalently bound to Lysine via dipeptide spacer
  MOD_RES (20)..(20): Xaa is Aib
  MISC_FEATURE (40)..(40): C-terminal amidation

SEQ ID NO: 1238 - protein, 41 aa, Artificial Sequence; identical to SEQ ID NO: 1160
  Synthetic polypeptide
  MISC_FEATURE: Homodimer
  MOD_RES (2)..(2): Xaa is Aib
  MOD_RES (20)..(20): Xaa is Aib
  MISC_FEATURE (40)..(40): 14 Carbon fatty acyl group covelently bound to Lysine
  MISC_FEATURE (41)..(41): C-terminal amidation
  MISC_FEATURE (41)..(41): Cys residue covalently attached to 20 kDa PEG which is in turn covalently attached to a Cys residue of a second peptide having the same structure

SEQ ID NO: 1239 - protein, 41 aa, Artificial Sequence; identical to SEQ ID NO: 1160
  Synthetic polypeptide
  MISC_FEATURE: homodimer
  MOD_RES (2)..(2): Xaa is Aib
  MOD_RES (20)..(20): Xaa is Aib
  MISC_FEATURE (40)..(40): 14 Carbon fatty acyl group covalently bound to Lysine
  MISC_FEATURE (41)..(41): PEG (5kDa) covalently bound to Cysteine
  MISC_FEATURE (41)..(41): C-terminal amidation
  MISC_FEATURE (41)..(41): Cys residue covalently attached to 5 kDa PEG which is in turn covalently attached to a Cys residue of a second peptide having the same structure

SEQ ID NO: 1240 - protein, 29 aa, Artificial Sequence
  Synthetic polypeptide
  MOD_RES (3)..(3): Xaa is a Glutamine analog
  MOD_RES (27)..(27): Xaa is Nle
HSXGTFTSDYSKYLDTRRAAEFVAWLXDE

SEQ ID NO: 1241 - protein, 29 aa, Artificial Sequence
  Synthetic polypeptide
  MOD_RES (3)..(3): Xaa is a Glutamine analog
  MOD_RES (16)..(16): Xaa is Aib
HSXGTFTSDYSKYLDXRRAADFVAWLMDE

SEQ ID NO: 1242 - protein, 29 aa, Artificial Sequence
  Synthetic polypeptide
  MOD_RES (27)..(27): Xaa is Nle
HSQGTFTSDYSKYLDTRRAAEFVAWLXDE

SEQ ID NO: 1243 - protein, 29 aa, Artificial Sequence
  Synthetic peptide
  MOD_RES (3)..(3): Xaa is Acetamidomethyl-cysteine
  MOD_RES (27)..(27): Xaa is Nle
HSXGTFTSDYSKYLDTRRAAEFVAWLXDE

SEQ ID NO: 1244 - protein, 29 aa, Artificial Sequence
  Synthetic peptide
  MOD_RES (3)..(3): Xaa is Acetyldiaminobutanoic acid
  MOD_RES (27)..(27): Xaa is Nle
HSXGTFTSDYSKYLDTRRAAEFVAWLXDE

SEQ ID NO: 1245 - protein, 29 aa, Artificial Sequence
  Synthetic polypeptide
  MOD_RES (3)..(3): Xaa is carbamoyldiaminopropanoic acid
  MOD_RES (27)..(27): Xaa is Nle
HSXGTFTSDYSKYLDTRRAAEFVAWLXDE

SEQ ID NO: 1246 - protein, 29 aa, Artificial Sequence
  Synthetic polypeptide
  MOD_RES (3)..(3): Xaa is Methylglutamine
  MOD_RES (27)..(27): Xaa is Nle
HSXGTFTSDYSKYLDTRRAAEFVAWLXDE

SEQ ID NO: 1247 - protein, 29 aa, Artificial Sequence
  Synthetic peptide
  MOD_RES (3)..(3): Xaa is Methionine sulfoxide
  MOD_RES (27)..(27): Xaa is Nle
HSXGTFTSDYSKYLDTRRAAEFVAWLXDE

SEQ ID NO: 1248 - protein, 29 aa, Artificial Sequence
  Synthetic peptide
  MOD_RES (3)..(3): Xaa is Acetylornithine
  MOD_RES (27)..(27): Xaa is Nle
HSXGTFTSDYSKYLDTRRAAEFVAWLXDE

SEQ ID NO: 1249 - protein, 29 aa, Artificial Sequence
  Synthetic polypeptide
  MOD_RES (16)..(16): Xaa is Aib
HSQGTFTSDYSKYLDXRRAADFVAWLMDE

SEQ ID NO: 1250 - protein, 29 aa, Artificial Sequence
  Synthetic polypeptide
  MOD_RES (3)..(3): Xaa is Acetyldiaminobutanoic acid
  MOD_RES (16)..(16): Xaa is Aib
HSXGTFTSDYSKYLDXRRAADFVAWLMDE

SEQ ID NO: 1251 - protein, 29 aa, Artificial Sequence
  Synthetic polypeptide
  MOD_RES (3)..(3): Xaa is Methylglutamine
  MOD_RES (16)..(16): Xaa is Aib
HSXGTFTSDYSKYLDXRRAADFVAWLMDE

SEQ ID NO: 1252 - protein, 29 aa, Artificial Sequence
  Synthetic polypeptide
HSQGTFTSDYSKYLDSRRAQDFVQWLMDT

SEQ ID NO: 1253 - protein, 29 aa, Artificial Sequence
  Synthetic polypeptide
  MOD_RES (3)..(3): Xaa is Acetyldiaminobutanoic acid
  MOD_RES (16)..(16): Xaa is Aib
HSXGTFTSDYSKYLDXRRAADFVAWLLDE

SEQ ID NO: 1254 - protein, 39 aa, Artificial Sequence; identical to SEQ ID NO: 604
  Synthetic polypeptide
  MOD_RES (3)..(3): Xaa is Acetyldiaminobutanoic acid
  MOD_RES (16)..(16): Xaa is Aib
  MISC_FEATURE (39)..(39): C-terminal amidation

SEQ ID NO: 1255 - protein, 29 aa, Artificial Sequence
  Synthetic polypeptide
  MOD_RES (3)..(3): Xaa is Acetyldiaminobutanoic acid
  MOD_RES (16)..(16): Xaa is Aib
HSXGTFTSDYSKYLDXRRASDFVSWLLDE

SEQ ID NO: 1256 - protein, 29 aa, Artificial Sequence
  Synthetic polypeptide
  MOD_RES (3)..(3): Xaa is Acetyldiaminobutanoic acid
  MOD_RES (16)..(16): Xaa is Aib
HSXGTFTSDYSKYLDXRRATDFVTWLLDE

SEQ ID NO: 1257-1258 - skipped (2 entries)

SEQ ID NO: 1259 - protein, 40 aa, Artificial Sequence
  Synthetic peptide
  MOD_RES (2)..(2): Xaa is Aib
  MISC_FEATURE (16)..(20): Lactam bridge links Glu16 and Lys20
  MOD_RES (40)..(40): Epsilon amine of Lys is attached to Ala-Ac-Cys(PEG), wherein the Ac-Cys(PEG) is a Cys residue comprising an alpha amino group capped with an acetyl group (CH3CO) and comprising a 40 kDa PEG covalently attached to its side chain
YXQGTFTSDYSIYLDEQAAKEFVNWLLAGGPSSGAPPPSK

SEQ ID NO: 1260 - protein, 40 aa, Artificial Sequence; identical to SEQ ID NO: 1259
  Synthetic peptide
  MOD_RES (2)..(2): Xaa is Aib
  MISC_FEATURE (16)..(20): Lactam bridge links Glu16 and Lys20
  MOD_RES (40)..(40): Epsilon amine of Lys is attached to Arg-Ac-Cys(PEG), wherein the Ac-Cys(PEG) is a Cys residue comprising an alpha amino group capped with an acetyl group (CH3CO) and comprising a 40 kDa PEG covalently attached to its side chain

SEQ ID NO: 1261 - protein, 40 aa, Artificial Sequence; identical to SEQ ID NO: 761
  Synthetic peptide
  MOD_RES (2)..(2): Xaa is Aib
  MISC_FEATURE (16)..(20): Lactam bridge links Glu16 and Lys20
  MOD_RES (40)..(40): Cys-PEG covalently linked via thioether linkage

SEQ ID NO: 1262 - protein, 40 aa, Artificial Sequence
  Synthetic peptide
  MOD_RES (2)..(2): Xaa is Aib
HXQGTFTSDYSKYLDERRAQDFVQWLMNTGPSSGAPPPSK

SEQ ID NO: 1263-1300 - skipped (38 entries)

SEQ ID NO: 1301 - protein, 29 aa, Homo sapiens
HSQGTFTSDYSKYLDSRRAQDFVQWLMNT

SEQ ID NO: 1302 - protein, 28 aa, Artificial Sequence
  Synthetic Polypeptide
  MISC_FEATURE: Glucagon analogue
  MISC_FEATURE (8)..(8): Xaa is aspartic acid, glutamic acid, cysteic acid or homocysteic acid
SQGTFTSXYSKYLDSRRAQDFVQWLMNT

SEQ ID NO: 1303 - protein, 27 aa, Artificial Sequence
  Synthetic Polypeptide
  MISC_FEATURE: Glucagon analogue
  MISC_FEATURE (7)..(7): Xaa is aspartic acid, glutamic acid, cysteic acid or homocysteic acid
QGTFTSXYSKYLDSRRAQDFVQWLMNT

SEQ ID NO: 1304 - protein, 26 aa, Artificial Sequence
  Synthetic Polypeptide
  MISC_FEATURE: Glucagon analogue
  MISC_FEATURE (6)..(6): Xaa is aspartic acid, glutamic acid, cysteic acid or homocysteic acid
GTFTSXYSKYLDSRRAQDFVQWLMNT

SEQ ID NO: 1305 - protein, 25 aa, Artificial Sequence
  Synthetic Polypeptide
  MISC_FEATURE: Glucagon analogue
  MISC_FEATURE (5)..(5): Xaa is aspartic acid, glutamic acid, cysteic acid or homocysteic acid
TFTSXYSKYLDSRRAQDFVQWLMNT

SEQ ID NO: 1306 - protein, 24 aa, Artificial Sequence
  Synthetic Polypeptide
  MISC_FEATURE: Glucagon analogue
  MISC_FEATURE (4)..(4): Xaa is glutamic acid, cysteic acid or homocysteic acid
  MISC_FEATURE (22)..(22): Xaa at position 22 is Met, Leu or Nle
FTSXYSKYLDSRRAQDFVQWLXNT

SEQ ID NO: 1307 - protein, 24 aa, Artificial Sequence
  Synthetic Polypeptide
  MOD_RES (1)..(1): N-terminal amino group replaced with hydroxy group
  MISC_FEATURE (4)..(4): Xaa is aspartic acid, glutamic acid, cysteic acid or homocysteic acid
  MISC_FEATURE (22)..(22): Xaa is Met, Leu or Nle
FTSXYSKYLDSRRAQDFVQWLXNT

SEQ ID NO: 1308 - protein, 24 aa, Artificial Sequence
  Synthetic Polypeptide
  MOD_RES (1)..(1): N-terminal amino group replaced with hydroxy group
  MISC_FEATURE (22)..(22): Xaa is  Met, Leu or Nle
  MOD_RES (24)..(24): C-terminal alpha carboxylate replaced with amide
FTSDYSRYLDSRRAQDFVQWLXNT

SEQ ID NO: 1309 - protein, 24 aa, Artificial Sequence
  Synthetic Polypeptide
  MISC_FEATURE: Glucagon analogue
  MOD_RES (1)..(1): N-terminal amino group replaced with hydroxy group
  MISC_FEATURE (4)..(4): Xaa is aspartic acid, glutamic acid, cysteic acid or homocysteic acid
  MISC_FEATURE (7)..(7): Xaa is Lys or Arg
  MISC_FEATURE (11)..(11): Xaa is Lys, Cys, Orn, homocysteine or acetyl phenyalanine
  MISC_FEATURE (22)..(22): Xaa is Met, Leu or Nle
FTSXYSXYLDXRRAQDFVQWLXNT

SEQ ID NO: 1310 - protein, 24 aa, Artificial Sequence
  Synthetic Polypeptide
  MISC_FEATURE: Glucagon analogue
  MOD_RES (1)..(1): N-terminal amino group replaced with hydroxy group
  MISC_FEATURE (4)..(4): Xaa is aspartic acid, glutamic acid, cysteic acid or homocysteic acid
  MISC_FEATURE (7)..(7): Xaa is is Lys or Arg
  MISC_FEATURE (16)..(16): Xaa is Lys, Cys, Orn, homocysteine or acetyl phenylalanine
  MISC_FEATURE (22)..(22): Xaa is Met, Leu or Nle
FTSXYSXYLDSRRAQXFVQWLXNT

SEQ ID NO: 1311 - protein, 24 aa, Artificial Sequence
  Synthetic Polypetide
  MISC_FEATURE: Glucagon analogue
  MOD_RES (1)..(1): N-terminal amino group replaced with hydroxy group
  MISC_FEATURE (4)..(4): Xaa is aspartic acid, glutamic acid, cysteic acid or homocysteic acid
  MISC_FEATURE (7)..(7): Xaa is Lys or Arg
  MISC_FEATURE (19)..(19): Xaa is Lys, Cys, Orn, homocysteine or acetyl phenylalanine
  MISC_FEATURE (22)..(22): Xaa is Met, Leu or Nle
FTSXYSXYLDSRRAQDFVXWLXNT

SEQ ID NO: 1312 - protein, 24 aa, Artificial Sequence
  Synthetic Polypeptide
  MISC_FEATURE: Glucagon analogue
  MOD_RES (1)..(1): N-terminal amino group replaced with hydroxy group
  MISC_FEATURE (4)..(4): Xaa is aspartic acid, glutamic acid, cysteic acid or homocysteic acid
  MISC_FEATURE (7)..(7): Xaa is Lys or Arg
  MISC_FEATURE (11)..(11): Xaa is Lys, Cys, Orn, homocysteine or acetyl phenylalanine
  MISC_FEATURE (19)..(19): Xaa is Lys, Cys, Orn, homocysteine or acetyl phenylalanine
  MISC_FEATURE (22)..(22): Xaa is Met, Leu or Nle
FTSXYSXYLDXRRAQDFVXWLXNT

SEQ ID NO: 1313 - protein, 24 aa, Artificial Sequence
  Synthetic Polypeptide
  MISC_FEATURE: Glucagon analogue
  MOD_RES (1)..(1): N-terminal amino group replaced with hydroxy group
  MISC_FEATURE (4)..(4): Xaa is aspartic acid, glutamic acid, cysteic acid or homocysteic acid
  MOD_RES (11)..(11): Pegylated
  MISC_FEATURE (22)..(22): Xaa is Met, Leu or Nle
FTSXYSKYLDCRRAQDFVQWLXNT

SEQ ID NO: 1314 - protein, 24 aa, Artificial Sequence
  Synthetic Polypeptide
  MISC_FEATURE: Glucagon analogue
  MOD_RES (1)..(1): N-terminal amino group replaced with hydroxy group
  MISC_FEATURE (4)..(4): Xaa is aspartic acid, glutamic acid, cysteic acid or homocysteic acid
  MOD_RES (19)..(19): Pegylated
  MISC_FEATURE (22)..(22): Xaa is Met, Leu or Nle
FTSXYSKYLDSRRAQDFVCWLXNT

SEQ ID NO: 1315 - protein, 24 aa, Artificial Sequence
  Synthetic Polypeptide
  MISC_FEATURE: Glucagon analogue
  MOD_RES (1)..(1): N-terminal amino group replaced with hydroxy group
  MISC_FEATURE (4)..(4): Xaa is aspartic acid, glutamic acid, cysteic acid or homocysteic acid
  MISC_FEATURE (22)..(22): Xaa is Met, Leu or Nle
  MOD_RES (24)..(24): Pegylated
FTSXYSKYLDSRRAQDFVQWLXNC

SEQ ID NO: 1316 - protein, 24 aa, Artificial Sequence
  Synthetic Polypeptide
  MISC_FEATURE: Glucagon analogue
  MOD_RES (1)..(1): N-terminal amino group replaced with hydroxy group
  MISC_FEATURE (4)..(4): Xaa is aspartic acid, glutamic acid, cysteic acid or homocysteic acid
  MOD_RES (19)..(19): Pegylated
  MISC_FEATURE (22)..(22): Xaa is Met, Leu or Nle
FTSXYSRYLDSRRAQDFVKWLXNT

SEQ ID NO: 1317 - protein, 24 aa, Artificial Sequence
  Synthetic Polypeptide
  MISC_FEATURE: Glucagon analogue
  MOD_RES (1)..(1): N-terminal amino group replaced with hydroxy group
  MISC_FEATURE (4)..(4): Xaa is aspartic acid, glutamic acid, cysteic acid or homocysteic acid
  MOD_RES (11)..(11): Pegylated
  MISC_FEATURE (22)..(22): Xaa is Met, Leu or Nle
FTSXYSKYLDCRRAQDFVCWLXNT

SEQ ID NO: 1318 - protein, 24 aa, Artificial Sequence
  Synthetic Polypeptide
  MISC_FEATURE: Glucagon analogue
  MOD_RES (1)..(1): N-terminal amino group replaced with hydroxy group
  MISC_FEATURE (4)..(4): Xaa is aspartic acid, glutamic acid, cysteic acid or homocysteic acid
  MISC_FEATURE (22)..(22): Xaa is Met, Leu or Nle
  MOD_RES (24)..(24): C-terminal alpha carboxylate replaced with amide
FTSXYSKYLECRRAQDFVQWLXNT

SEQ ID NO: 1319 - protein, 10 aa, Artificial Sequence
  Synthetic Polypeptide
  MISC_FEATURE: Peptide fragment representing the carboxy terminal 10 amino acids of Exendin-4
GPSSGAPPPS

SEQ ID NO: 1320 - protein, 8 aa, Artificial Sequence
  Synthetic Polypeptide
  MISC_FEATURE: Peptide fragment representing the carboxy terminal 8 amino acids of oxyntomodulin
KRNRNNIA

SEQ ID NO: 1321 - protein, 4 aa, Artificial Sequence
  Synthetic Polypeptide
  MISC_FEATURE: Peptide fragment representing the carboxy 4 amino acids of oxyntomodulin carboxy terminus
KRNR

SEQ ID NO: 1322 - protein, 24 aa, Artificial Sequence
  Synthetic Polypeptide
  MISC_FEATURE: Glucagon analogue
  MISC_FEATURE (7)..(7): Xaa is Lys or Arg
  MISC_FEATURE (11)..(11): Xaa is Lys, Cys, Orn, homocycstein or acetyl phenyalanine
  MISC_FEATURE (19)..(19): Xaa is Lys, Cys, Orn, homocycstein or acetyl phenyalanine
FTSRYSXYLDXRRAQDFVXWLMNT

SEQ ID NO: 1323 - protein, 34 aa, Artificial Sequence
  Synthetic Polypeptide
  MISC_FEATURE: Glucagon analogue
  MISC_FEATURE (4)..(4): Xaa is aspartic acid, glutamic acid, cysteic acid or homocysteic acid
  MISC_FEATURE (7)..(7): Xaa is Lys or Arg
  MISC_FEATURE (16)..(16): Xaa is Lys, Cys, Orn, homocysteine or acetyl phenylalanine
  MISC_FEATURE (22)..(22): Xaa is Met, Leu or Nle
FTSXYSXYLDSRRAQXFVQWLXNTGPSSGAPPPS

SEQ ID NO: 1324 - protein, 32 aa, Artificial Sequence
  Synthetic Polypeptide
  MISC_FEATURE: Glucagon analogue
  MISC_FEATURE (4)..(4): Xaa is aspartic acid, glutamic acid, cysteic acid or homocysteic acid
  MISC_FEATURE (7)..(7): Xaa is Lys or Arg
  MISC_FEATURE (19)..(19): Xaa is Lys, Cys, Orn, homocysteine or acetyl phenylalanine
  MOD_RES (19)..(19): Pegylated
  MISC_FEATURE (22)..(22): Xaa is Met, Leu or Nle
FTSXYSXYLDSRRAQDFVXWLXNTKRNRNNIA

SEQ ID NO: 1325 - protein, 34 aa, Artificial Sequence
  Synthetic Polypeptide
  MISC_FEATURE: Glucagon analogue
  MISC_FEATURE (4)..(4): Xaa is aspartic acid, glutamic acid, cysteic acid or homocysteic acid
  MISC_FEATURE (7)..(7): Xaa is Lys or Arg
  MISC_FEATURE (19)..(19): Xaa is Lys, Cys, Orn, homocysteine or acetyl phenylalanine
  MOD_RES (19)..(19): Pegylated
  MISC_FEATURE (22)..(22): Xaa is Met, Leu or Nle
FTSXYSXYLDSRRAQDFVXWLXNTGPSSGAPPPS

SEQ ID NO: 1326 - protein, 32 aa, Artificial Sequence
  Synthetic Polypeptide
  MISC_FEATURE: Glucagon analogue
  MISC_FEATURE (4)..(4): Xaa is aspartic acid, glutamic acid, cysteic acid or homocysteic acid
  MISC_FEATURE (7)..(7): Xaa is Lys or Arg
  MISC_FEATURE (16)..(16): Xaa is Lys, Cys, Orn, homocysteine or acetyl phenylalanine
  MOD_RES (16)..(16): Pegylation
  MISC_FEATURE (22)..(22): Xaa is Met, Leu or Nle
FTSXYSXYLDSRRAQXFVQWLXNTKRNRNNIA

SEQ ID NO: 1327 - protein, 28 aa, Artificial Sequence
  Synthetic Polypeptide
  MISC_FEATURE: Glucagon analogue
  MISC_FEATURE (4)..(4): Xaa is aspartic acid, glutamic acid, cysteic acid or homocysteic acid
  MISC_FEATURE (7)..(7): Xaa is Lys or Arg
  MISC_FEATURE (16)..(16): Xaa is Lys, Cys, Orn, homocysteine or acetyl phenylalanine
  MOD_RES (16)..(16): Pegylated
  MISC_FEATURE (22)..(22): Xaa is Met, Leu or Nle
FTSXYSXYLDSRRAQXFVQWLXNTKRNR

SEQ ID NO: 1328 - protein, 28 aa, Artificial Sequence
  Synthetic Polypeptide
  MISC_FEATURE: Glucagon analogue
  MISC_FEATURE (4)..(4): Xaa is aspartic acid, glutamic acid, cysteic acid or homocysteic acid
  MISC_FEATURE (7)..(7): Xaa is Lys or Arg
  MISC_FEATURE (19)..(19): Xaa is Lys, Cys, Orn, homocysteine or acetyl phenylalanine
  MOD_RES (19)..(19): Pegylated
  MISC_FEATURE (22)..(22): Xaa is Met, Leu or Nle
FTSXYSXYLDSRRAQDFVXWLXNTKRNR

SEQ ID NO: 1329 - protein, 34 aa, Artificial Sequence
  Synthetic Polypeptide
  MISC_FEATURE: Glucagon analogue
  MOD_RES (1)..(1): N-terminal amino group replaced with hydroxy group
  MISC_FEATURE (4)..(4): Xaa is aspartic acid, glutamic acid, cysteic acid or homocysteic acid
  MISC_FEATURE (22)..(22): Xaa is Met, Leu or Nle
FTSXYSKYLDSRRAQDFVQWLXNTGPSSGAPPPS

SEQ ID NO: 1330 - protein, 32 aa, Artificial Sequence
  Synthetic Polypeptide
  MISC_FEATURE: Glucagon analogue
  MOD_RES (1)..(1): N-terminal amino group replaced with hydroxy group
  MISC_FEATURE (4)..(4): Xaa is aspartic acid, glutamic acid, cysteic acid or homocysteic acid
  MISC_FEATURE (22)..(22): Xaa is Met, Leu or Nle
FTSXYSKYLDSRRAQDFVQWLXNTKRNRNNIA

SEQ ID NO: 1331 - protein, 28 aa, Artificial Sequence
  Synthetic Polypeptide
  MISC_FEATURE: Glucagon analogue
  MOD_RES (1)..(1): N-terminal amino group replaced with hydroxy group
  MISC_FEATURE (4)..(4): Xaa is aspartic acid, glutamic acid, cysteic acid or homocysteic acid
  MISC_FEATURE (22)..(22): Xaa is Met, Leu or Nle
FTSXYSKYLDSRRAQCFVQWLXNTKRNR

SEQ ID NO: 1332 - protein, 29 aa, Artificial Sequence
  Synthetic Polypeptide
  MISC_FEATURE: Glucagon analogue
HSQGTFTSDYSKYLDSCRAQDFVQWLMNT

SEQ ID NO: 1333 - protein, 39 aa, Artificial Sequence; identical to SEQ ID NO: 36
  Synthetic Polypeptide
  MISC_FEATURE: Glucagon analogue

SEQ ID NO: 1334 - protein, 29 aa, Artificial Sequence
  Synthetic Polypeptide
  MISC_FEATURE: Glucagon analogue
  MOD_RES (24)..(24): 2-butyrolactone bound through thiol group of Cysteine
HSQGTFTSDYSKYLDSRRAQCFVQWLMNT

SEQ ID NO: 1335 - protein, 29 aa, Artificial Sequence
  Synthetic Polypeptide
  MISC_FEATURE: Glucagon Analogue
  MOD_RES (24)..(24): Carboxymethyl group bound through thiol group of Cysteine
HSQGTFTSDYSKYLDSRRAQCFVQWLMNT

SEQ ID NO: 1336 - protein, 24 aa, Artificial Sequence
  Synthetic Polypeptide
  MISC_FEATURE: Glucagon analogue
  MOD_RES (1)..(1): N-terminal amino group replaced with hydroxy group
  MISC_FEATURE (4)..(4): Xaa is aspartic acid, glutamic acid, cysteic acid or homocysteic acid
  MISC_FEATURE (22)..(22): Xaa is Met, Leu or Nle
FTSXYSKYLESRRAQDFVQWLXNT

SEQ ID NO: 1337 - protein, 24 aa, Artificial Sequence
  Synthetic Polypeptide
  MISC_FEATURE: Glucagon analogue
  MOD_RES (1)..(1): N-terminal amino group replaced with hydroxy group
  MISC_FEATURE (22)..(22): Xaa is Met, Leu or Nle
FTSDYSKYLDSRRAQDFVQWLXNT

SEQ ID NO: 1338 - protein, 24 aa, Artificial Sequence
  Synthetic Polypeptide
  MISC_FEATURE: Glucagon analogue
  MOD_RES (1)..(1): N-terminal amino group replaced with hydroxy group
  MISC_FEATURE (22)..(22): Xaa is Met, Leu or Nle
FTSDYSKYLESRRAQDFVQWLXNT

SEQ ID NO: 1339 - protein, 24 aa, Artificial Sequence
  Synthetic Polypeptide
  MISC_FEATURE: Glucagon analogue
  MISC_FEATURE (1)..(1): N-terminal amino group replaced with hydroxy group
  MISC_FEATURE (4)..(4): Xaa is aspartic acid, glutamic acid, cysteic acid or homocysteic acid
  MISC_FEATURE (22)..(22): Xaa is Met, Leu or Nle
  MISC_FEATURE (23)..(23): Xaa is Asn, Asp, Glu, cysteic acid or homocysteic acid
  MISC_FEATURE (24)..(24): Xaa id Thr, Asp, Glu, cysteic acid or homocysteic acid
FTSXYSKYLDSRRAQDFVQWLXXX

SEQ ID NO: 1340 - protein, 24 aa, Artificial Sequence
  Synthetic Polypeptide
  MISC_FEATURE: Glucagon analogue
  MOD_RES (1)..(1): N-terminal amino group replaced with hydroxy group
  MISC_FEATURE (4)..(4): Xaa is aspartic acid, glutamic acid, cysteic acid or homocysteic acid
  MISC_FEATURE (10)..(10): Xaa is Glu, cysteic acid, homoglutamic acid or homocysteic acid
  MISC_FEATURE (22)..(22): Xaa is Met, Leu or Nle
  MISC_FEATURE (23)..(23): Xaa is Asn or an acidic amino acid
  MISC_FEATURE (24)..(24): Xaa is Thr or an acidic amino acid
FTSXYSKYLXSRRAQDFVQWLXXX

SEQ ID NO: 1341 - protein, 24 aa, Artificial Sequence
  Synthetic Polypeptide
  MISC_FEATURE: Glucagon analogue
  MOD_RES (1)..(1): N-terminal amino group replaced with hydroxy group
  MISC_FEATURE (4)..(4): Xaa is aspartic acid, glutamic acid, cysteic acid or homocysteic acid
  MISC_FEATURE (10)..(10): Xaa is Glu, cysteic acid, homoglutamic acid or homocysteic acid
  MISC_FEATURE (22)..(22): Xaa is Met, Leu or Nle
  MISC_FEATURE (23)..(23): Xaa is Asn, Asp or Glu
  MISC_FEATURE (24)..(24): Xaa is Thr, glu or Asp
FTSXYSKYLXSRRAQDFVQWLXXX

SEQ ID NO: 1342 - protein, 24 aa, Artificial Sequence
  Synthetic Polypeptide
  MISC_FEATURE: Glucagon analogue
  MOD_RES (1)..(1): N-terminal amino group replaced with hydroxy group
  MISC_FEATURE (4)..(4): Xaa is aspartic acid, glutamic acid, cysteic acid or homocysteic acid
  MISC_FEATURE (10)..(10): Xaa is Glu, cysteic acid, homoglutamic acid or homocysteic acid
  MISC_FEATURE (22)..(22): Xaa is Met, Leu or Nle
  MISC_FEATURE (23)..(23): Xaa is Asn or an acidic amino acid
  MISC_FEATURE (24)..(24): Xaa is Thr or an acidic amino acid
FTSXYSKYLXSRRAQDFVQWLXXX

SEQ ID NO: 1343 - protein, 24 aa, Artificial Sequence
  Synthetic Polypeptide
  MISC_FEATURE: Glucagon analogue
  MOD_RES (1)..(1): N-terminal amino group replaced with hydroxy group
  MISC_FEATURE (4)..(4): Xaa is aspartic acid, glutamic acid, cysteic acid or homocysteic acid
  MISC_FEATURE (10)..(10): Xaa is Asp, Glu, cysteic acid, homoglutamic acid or homocysteic acid
  MOD_RES (11)..(11): 20kDa PEG group attached to Xaa at position 11
  MISC_FEATURE (22)..(22): Xaa is Met, Leu or Nle
  MISC_FEATURE (23)..(23): Xaa is Asn or an acidic amino acid
  MISC_FEATURE (24)..(24): Xaa is Thr or an acidic amino acid
FTSXYSKYLXCRRAQDFVQWLXXX

SEQ ID NO: 1344 - protein, 24 aa, Artificial Sequence
  Synthetic Polypeptide
  MISC_FEATURE: Glucagon analogue
  MOD_RES (1)..(1): N-terminal amino group replaced with hydroxy group
  MISC_FEATURE (4)..(4): Xaa is aspartic acid, glutamic acid, cysteic acid or homocysteic acid
  MISC_FEATURE (10)..(10): Xaa is Asp, Glu, cysteic acid, homoglutamic acid or homocysteic acid
  MOD_RES (16)..(16): 20kDa PEG group attached to Xaa at position 16
  MISC_FEATURE (22)..(22): Xaa is Met, Leu or Nle
  MISC_FEATURE (23)..(23): Xaa is Asn or an acidic amino acid
  MISC_FEATURE (24)..(24): Xaa is Thr or an acidic amino acid
FTSXYSKYLXSRRAQCFVQWLXXX

SEQ ID NO: 1345 - protein, 24 aa, Artificial Sequence
  Synthetic Polypeptide
  MISC_FEATURE: Glucagon analogue
  MOD_RES (1)..(1): N-terminal amino group replaced with hydroxy group
  MISC_FEATURE (4)..(4): Xaa is aspartic acid, glutamic acid, cysteic acid or homocysteic acid
  MISC_FEATURE (10)..(10): Xaa is Asp, Glu, cysteic acid, homoglutamic acid or homocysteic acid
  MOD_RES (19)..(19): Pegylated
  MISC_FEATURE (22)..(22): Xaa is Met, Leu or Nle
  MISC_FEATURE (23)..(23): Xaa is Asn or an acidic amino acid
  MISC_FEATURE (24)..(24): Xaa is Thr or an acidic amino acid
FTSXYSKYLXSRRAQDFVCWLXXX

SEQ ID NO: 1346 - protein, 35 aa, Artificial Sequence
  Synthetic Polypeptide
  MISC_FEATURE: Glucagon analogue
  MOD_RES (1)..(1): N-terminal amino group replaced with hydroxy group
  MISC_FEATURE (4)..(4): Xaa is aspartic acid, glutamic acid, cysteic acid or homocysteic acid
  MISC_FEATURE (10)..(10): Xaa is Asp, Glu, cysteic acid, homoglutamic acid or homocysteic acid
  MISC_FEATURE (22)..(22): Xaa is Met, Leu or Nle
  MISC_FEATURE (23)..(23): Xaa is Asn or an acidic amino acid
  MISC_FEATURE (24)..(24): Xaa is Thr or an acidic amino acid
  MISC_FEATURE (25)..(25): Xaa is Lys, Cys, Orn, homocycstein or acetyl phenyalanine
  MOD_RES (25)..(25): Pegylated
FTSXYSKYLXSRRAQDFVQWLXXXXGPSSGAPPPS

SEQ ID NO: 1347 - protein, 35 aa, Artificial Sequence
  Synthetic Polypeptide
  MISC_FEATURE: Glucagon analogue
  MOD_RES (1)..(1): N-terminal amino group replaced with hydroxy group
  MISC_FEATURE (4)..(4): Xaa is aspartic acid, glutamic acid, cysteic acid or homocysteic acid
  MISC_FEATURE (10)..(10): Xaa is Asp, Glu, cysteic acid, homoglutamic acid or homocysteic acid
  MISC_FEATURE (22)..(22): Xaa is Met, Leu or Nle
  MISC_FEATURE (23)..(23): Xaa is Asn or an acidic amino acid
  MISC_FEATURE (24)..(24): Xaa is Thr or an acidic amino acid
  MISC_FEATURE (35)..(35): Xaa is Lys, Cys, Orn, homocysteine or acetyl phenyalanine
  MOD_RES (35)..(35): Pegylated
FTSXYSKYLXSRRAQDFVQWLXXXGPSSGAPPPSX

SEQ ID NO: 1348 - protein, 39 aa, Artificial Sequence; identical to SEQ ID NO: 39
  Synthetic Polypeptide
  MISC_FEATURE: Glucagon analogue

SEQ ID NO: 1349 - protein, 35 aa, Artificial Sequence
  Synthetic Polypeptide
  MISC_FEATURE: Glucagon analogue
  MOD_RES (1)..(1): N-terminal amino group replaced with hydroxy group
  MISC_FEATURE (4)..(4): Xaa is aspartic acid, glutamic acid, cysteic acid or homocysteic acid
  MISC_FEATURE (7)..(7): Xaa is Lys or Arg
  MISC_FEATURE (22)..(22): Xaa is Met , Leu or Nle
  MISC_FEATURE (35)..(35): Xaa is Lys, Cys, Orn, homocysteine or acetyl phenyalanine
  MOD_RES (35)..(35): Pegylated
FTSXYSXYLDSRRAQDFVQWLXNTGPSSGAPPPSX

SEQ ID NO: 1350 - protein, 24 aa, Artificial Sequence
  Synthetic Polypeptide
  MISC_FEATURE: Glucagon analogue
  MOD_RES (1)..(1): N-terminal amino group replaced with hydroxy group
FTSEYSKYLDSRRAQDFVQWLMNT

SEQ ID NO: 1351 - protein, 20 aa, Artificial Sequence
  Synthetic Polypeptide
  MISC_FEATURE: Glucagon analogue
YSKYLDSRRAQDFVQWLMNT

SEQ ID NO: 1352 - protein, 24 aa, Artificial Sequence
  Synthetic Polypeptide
  MISC_FEATURE: Glucagon analogue
  MISC_FEATURE (4)..(4): Xaa is Homocysteic acid
FTSXYSKYLDSRRAQDFVQWLMNT

SEQ ID NO: 1353 - protein, 11 aa, Artificial Sequence
  Synthetic Polypeptide
  MISC_FEATURE: Peptide fragment representing the carboxy terminal 10 amino acids of Exendin-4
  MISC_FEATURE (11)..(11): Xaa is Lys, Cys, Orn, homocysteine or acetyl phenyalanine
GPSSGAPPPSX

SEQ ID NO: 1354 - protein, 6 aa, Artificial Sequence
  Synthetic Polypeptide
  MISC_FEATURE (6)..(6): Xaa is phenyl lactic acid
HSQGTX

SEQ ID NO: 1355 - protein, 5 aa, Artificial Sequence
  Synthetic Polypeptide
  MISC_FEATURE (5)..(5): Xaa is phenyl lactic acid
SQGTX

SEQ ID NO: 1356 - protein, 4 aa, Artificial Sequence
  Synthetic Polypeptide
  MISC_FEATURE (4)..(4): Xaa is phenyl lactic acid
QGTX

SEQ ID NO: 1357 - protein, 3 aa, Artificial Sequence
  Synthetic Polypeptide
  MISC_FEATURE (3)..(3): Xaa is phenyl lactic acid
GTX

SEQ ID NO: 1358 - protein, 2 aa, Artificial Sequence
  Synthetic Polypeptide
  MISC_FEATURE (2)..(2): Xaa is phenyl lactic acid
TX

SEQ ID NO: 1359 - protein, 6 aa, Artificial Sequence
  Synthetic Polypeptide
  MISC_FEATURE (1)..(1): Xaa is selected from a group consisting of His, D-histidine, alpha, alpha-dimethyl imidiazole acetic acid (DMIA), N-methyl histidine, alpha-methyl histidine, imidazole acetic acid, desaminohistidine, hydroxyl-histidine, acetyl-histidine and
  MISC_FEATURE (2)..(2): Xaa is selected from a group consisting of Ser, D-serine, D-alanine, Val, Gly, N-methyl serine, N-methyl alanine, and aminoisobutyric acid (AIB)
  MISC_FEATURE (3)..(3): Xaa is selected from a group consisting of Glu or Gln
  MISC_FEATURE (6)..(6): Xaa is phenyl lactic acid
XXXGTX

SEQ ID NO: 1360 - protein, 5 aa, Artificial Sequence
  Synthetic Polypeptide
  MISC_FEATURE (1)..(1): Xaa is selected from a group consisting of Ser, D-serine, D-alanine, Val, Gly, N-methyl serine, N-methyl alanine, and aminoisobutyric acid (AIB)
  MISC_FEATURE (2)..(2): Xaa is selected from a group consisting of Glu or Gln
  MISC_FEATURE (5)..(5): Xaa is phenyl lactic acid
XXGTX

SEQ ID NO: 1361 - protein, 4 aa, Artificial Sequence
  Synthetic Polypeptide
  MISC_FEATURE (1)..(1): Xaa is selected from a group consisting of Glu and Gln
  MISC_FEATURE (4)..(4): Xaa is phenyl lactic acid
XGTX

SEQ ID NO: 1362 - protein, 24 aa, Artificial Sequence
  Synthetic Polypeptide
  MOD_RES (1)..(1): N-terminal amino group replaced with hydroxy group
  MOD_RES (24)..(24): C-terminal alpha carboxylate optionally replaced with amide
FTSDYSKYLDSRRAQDFVQWLMDT

SEQ ID NO: 1363 - protein, 28 aa, Artificial Sequence
  Synthetic Polypeptide
  MOD_RES (28)..(28): C-terminal alpha carboxylate optionally replaced with amide
SQGTFTSEYSKYLDSRRAQDFVQWLMNT

SEQ ID NO: 1364 - protein, 28 aa, Artificial Sequence
  Synthetic Polypeptide
  MISC_FEATURE (4)..(5): Threonine in position 4 and phenyl lactic acid in position 5 linked via ester bond
  MISC_FEATURE (5)..(5): Xaa is phenyl lactic acid
  MOD_RES (28)..(28): Optional C-terminal alpha carboxylate replaced with amide
  MOD_RES (28)..(28): C-terminal alpha carboxylate optionally replaced with amide
SQGTXTSEYSKYLDSRRAQDFVQWLMNT

SEQ ID NO: 1365 - protein, 29 aa, Artificial Sequence
  Synthetic Polypeptide
  MISC_FEATURE (5)..(6): Threonine in position 5 and phenyl lactic acid in position 6 linked via ester bond
  MISC_FEATURE (6)..(6): Xaa is phenyl lactic acid
  MOD_RES (29)..(29): C-terminal alpha carboxylate optionally replaced with amide
HSQGTXTSEYSKYLDSRRAQDFVQWLMNT

SEQ ID NO: 1366 - protein, 24 aa, Artificial Sequence
  Synthetic Polypeptide
  MOD_RES (1)..(1): N-terminal amino group replaced with hydroxy group
  MISC_FEATURE (11)..(11): Xaa is amino isobutyric acid
FTSDYSKYLDXRRAQDFVQWLMNT

SEQ ID NO: 1367 - protein, 24 aa, Artificial Sequence
  Synthetic Polypeptide
  MOD_RES (1)..(1): N-terminal amino group replaced with hydroxy group
FTSDYSKYLDERRAQDFVQWLMNT

SEQ ID NO: 1368 - protein, 6 aa, Artificial Sequence
  Synthetic Polypeptide
  MISC_FEATURE (1)..(1): Xaa is selected from a group consisting of His, D-histidine, alpha, alpha-dimethyl imidiazole acetic acid (DMIA), N-methyl histidine, alpha-methyl histidine, imidazole acetic acid, desaminohistidine, hydroxyl-histidine, acetyl-histidine and
  MISC_FEATURE (2)..(2): Xaa is selected from a group consisting of Ser, D-serine, D-alanine, Val, Gly, N-methyl serine, N-methyl alanine, and aminoisobutyric acid (AIB)
  MISC_FEATURE (3)..(3): Xaa is selected from a group consisting of Glu or Gln
XXXTGF

SEQ ID NO: 1369 - protein, 5 aa, Artificial Sequence
  Synthetic Polypeptide
  MISC_FEATURE (1)..(1): Xaa is selected from a group consisting of Ser, D-serine, D-alanine, Val, Gly, N-methyl serine, N-methyl alanine, and aminoisobutyric acid (AIB)
  MISC_FEATURE (2)..(2): Xaa is selected from a group consisting of Glu or Gln
XXTGF

SEQ ID NO: 1370 - protein, 4 aa, Artificial Sequence
  Synthetic Polypeptide
  MISC_FEATURE (1)..(1): Xaa is selected from a group consisting of Glu or Gln
XTGF

SEQ ID NO: 1371 - protein, 24 aa, Artificial Sequence
  Synthetic Polypeptide
  MOD_RES (1)..(1): N-terminal amino group replaced with hydroxy group
  MISC_FEATURE (24)..(24): C-terminal alpha carboxylate optionally replaced with an amide
FTSEYSKYLDSRRAQDFVQWLMNT

SEQ ID NO: 1372-1400 - skipped (29 entries)

SEQ ID NO: 1401 - protein, 29 aa, Homo sapiens
HSQGTFTSDYSKYLDSRRAQDFVQWLMNT

SEQ ID NO: 1402 - protein, 24 aa, Artificial Sequence
  Synthetic Polypeptide
  MISC_FEATURE: Glucagon analogue
  MOD_RES (1)..(1): N-terminal amino group replaced with hydroxy group
FTSDYSKYLDSRRAQDFVQWLMNT

SEQ ID NO: 1403 - protein, 31 aa, Homo sapiens; identical to SEQ ID NO: 50

SEQ ID NO: 1404 - protein, 30 aa, Homo sapiens; identical to SEQ ID NO: 52

SEQ ID NO: 1405 - protein, 24 aa, Artificial Sequence
  Synthetic Polypeptide
  MISC_FEATURE: Glucagon analogue
  MOD_RES (1)..(1): N-terminal amino group replaced with hydroxy group
FTSDYSKYLDERRAQDFVQWLMNT

SEQ ID NO: 1406 - protein, 24 aa, Artificial Sequence
  Synthetic Polypeptide
  MOD_RES (1)..(1): N-terminal amino group replaced with hydroxy group
FTSDYSKYLDERRAKDFVQWLMNT

SEQ ID NO: 1407 - protein, 24 aa, Artificial Sequence
  Synthetic Polypeptide
  MISC_FEATURE: Glucagon analogue
  MOD_RES (1)..(1): N-terminal amino group replaced with hydroxy group
  MISC_FEATURE (11)..(11): Xaa is Ser or Glu
FTSDYSKYLDXRRAKDFVEWLMNT

SEQ ID NO: 1408 - protein, 24 aa, Artificial Sequence
  Synthetic Polypeptide
  MISC_FEATURE: Glucagon analogue
  MOD_RES (1)..(1): N-terminal amino group replaced with hydroxy group
  MISC_FEATURE (11)..(11): Xaa is Ser or Glu
FTSDYSKYLDXRRAQDFVEWLMKT

SEQ ID NO: 1409 - protein, 24 aa, Artificial Sequence
  Synthetic Polypeptide
  MISC_FEATURE: Glucagon analogue
  MOD_RES (1)..(1): N-terminal amino group replaced with hydroxy group
  MISC_FEATURE (7)..(7): Xaa at position 7 is Lys or Glu
  MISC_FEATURE (10)..(10): Xaa is Asp, Glu, homoglutamic acid, cysteic acid or homocysteic acid
  MISC_FEATURE (11)..(11): Xaa is Ala, Ser, Glu, Lys, homoglutamic acid or homocysteic acid
  MISC_FEATURE (15)..(15): Xaa is Gln, Glu or Lys
  MISC_FEATURE (19)..(19): Xaa is Ala, Gln, Lys or Glu
  MISC_FEATURE (23)..(23): Xaa is Asn, Lys or an acidic amino acid
  MISC_FEATURE (24)..(24): Xaa is Thr or an acidic amino acid
FTSDYSXYLXXRRAXDFVXWLMXX

SEQ ID NO: 1410 - protein, 24 aa, Artificial Sequence
  Synthetic Polypeptide
  MISC_FEATURE: Glucagon analogue
  MOD_RES (1)..(1): N-terminal amino group replaced with hydroxy group
  MISC_FEATURE (11)..(11): Xaa is Ala, Ser, Glu, Gln, homoglutamic acid or homocysteic acid
  MISC_FEATURE (15)..(15): Xaa is Gln or Lys
  MISC_FEATURE (19)..(19): Xaa is Ala, Gln or Glu
  MISC_FEATURE (23)..(23): Xaa is Asn, Lys or an acidic amino acid
FTSDYSKYLDXRRAXDFVXWLMXT

SEQ ID NO: 1411 - protein, 24 aa, Artificial Sequence
  Synthetic Polypeptide
  MISC_FEATURE: Glucagon analogue
  MOD_RES (1)..(1): N-terminal amino group replaced with hydroxy group
  MISC_FEATURE (11)..(11): Xaa is Ala, Ser, Glu, Gln, homoglutamic acid or homocysteic acid
  MISC_FEATURE (15)..(15): Xaa is Gln or Lys
FTSDYSKYLDXRRAXDFVQWLMNT

SEQ ID NO: 1412 - protein, 24 aa, Artificial Sequence
  Synthetic Polypeptide
  MISC_FEATURE: Glucagon analogue
  MOD_RES (1)..(1): N-terminal amino group replaced with hydroxy group
  MISC_FEATURE (4)..(4): Xaa is aspartic acid, glutamic acid, cysteic acid or homocysteic acid
  MISC_FEATURE (7)..(7): Xaa is Lys or Arg
  MISC_FEATURE (15)..(15): Xaa is Lys or Gln
  MISC_FEATURE (16)..(16): Xaa is Lys, Cys, Orn, homocysteine or acetyl phenyalanine
  MOD_RES (16)..(16): Pegylated
  MISC_FEATURE (19)..(19): Xaa is Lys, Cys, Orn, homocysteine or acetyl phenylalanine
  MOD_RES (19)..(19): Pegylated
  MISC_FEATURE (22)..(22): Xaa is Met, Leu or Nle
FTSXYSXYLDERRAXXFVXWLXNT

SEQ ID NO: 1413 - protein, 24 aa, Artificial Sequence
  Synthetic Polypeptide
  MISC_FEATURE: Glucagon analogue
  MOD_RES (1)..(1): N-terminal amino group replaced with hydroxy group
  MISC_FEATURE (4)..(4): Xaa is aspartic acid, glutamic acid, cysteic acid or homocysteic acid
  MISC_FEATURE (15)..(15): Xaa is Lys or Gln
  MISC_FEATURE (16)..(16): Xaa is Cys, Orn, homocysteine or acetyl phenyalanine
  MOD_RES (16)..(16): Pegylated
  MISC_FEATURE (22)..(22): Xaa is Met, Leu or Nle
FTSXYSKYLDERRAXXFVQWLXNT

SEQ ID NO: 1414 - protein, 24 aa, Artificial Sequence
  Synthetic Polypeptide
  MISC_FEATURE: Glucagon analogue
  MOD_RES (1)..(1): N-terminal amino group replaced with hydroxy group
  MISC_FEATURE (4)..(4): Xaa is aspartic acid, glutamic acid, cysteic acid or homocysteic acid
  MISC_FEATURE (15)..(15): Xaa is Lys or Gln
  MISC_FEATURE (19)..(19): Xaa is Cys, Orn, homocysteine or acetyl phenylalanine
  MOD_RES (19)..(19): Pegylated
  MISC_FEATURE (22)..(22): Xaa is Met, Leu or Nle
FTSXYSKYLDERRAXDFVXWLXNT

SEQ ID NO: 1415 - protein, 24 aa, Artificial Sequence
  Synthetic Polypeptide
  MISC_FEATURE: Glucagon analogue
  MOD_RES (1)..(1): N-terminal amino group replaced with hydroxy group
  MISC_FEATURE (4)..(4): Xaa is aspartic acid, glutamic acid, cysteic acid, homoglutamic acid or homocysteic acid
  MISC_FEATURE (7)..(7): Xaa is Lys or Glu
  MISC_FEATURE (10)..(10): Xaa is Asp, Glu, cysteic acid, homoglutamic acid or homocysteic acid
  MISC_FEATURE (11)..(11): Xaa is Ala, Ser, Glu, Lys Gln, homoglutamic acid or homocysteic acid
  MISC_FEATURE (15)..(15): Xaa is Arg, Gln, Glu or Lys
  MISC_FEATURE (19)..(19): Xaa is Ala, Gln, Lys or Glu
  MISC_FEATURE (22)..(22): Xaa is Met, Leu or Nle
  MISC_FEATURE (23)..(23): Xaa is Asn, Lys or an acidic amino acid
  MISC_FEATURE (24)..(24): Xaa is Thr or an acidic amino acid
FTSXYSXYLXXRRAXDFVXWLXXX

SEQ ID NO: 1416 - protein, 24 aa, Artificial Sequence
  Synthetic Polypeptide
  MISC_FEATURE: Glucagon analogue
  MOD_RES (1)..(1): N-terminal amino group replaced with hydroxy group
  MISC_FEATURE (7)..(11): Lactam bridge connecting residues 7 and 11
  MISC_FEATURE (10)..(10): Xaa is Glu or Asp
  MISC_FEATURE (22)..(22): Xaa is Met, Leu or Nle
  MISC_FEATURE (23)..(23): Xaa is Asn, Asp or Glu
  MOD_RES (24)..(24): C-terminal alpha carboxylate replaced with amide
FTSDYSKYLXERRAQDFVQWLXXT

SEQ ID NO: 1417 - protein, 24 aa, Artificial Sequence
  Synthetic Polypeptide
  MISC_FEATURE: Glucagon analogue
  MOD_RES (1)..(1): N-terminal amino group replaced with hydroxy group
  MISC_FEATURE (10)..(10): Xaa is Asp or Glu
  MISC_FEATURE (11)..(15): Lactam bridge connecting residues 11 and 15
  MISC_FEATURE (22)..(22): Xaa is Met, Leu or Nle
  MISC_FEATURE (23)..(23): Xaa is Asn, Asp or Glu
  MOD_RES (24)..(24): C-terminal alpha carboxylate replaced with amide
FTSDYSKYLXERRAKDFVQWLXXT

SEQ ID NO: 1418 - protein, 24 aa, Artificial Sequence
  Synthetic Polypeptide
  MISC_FEATURE: Glucagon analogue
  MOD_RES (1)..(1): N-terminal amino group replaced with hydroxy group
  MISC_FEATURE (10)..(10): Xaa is Asp or Glu
  MISC_FEATURE (11)..(11): Xaa is Ser or Glu
  MISC_FEATURE (15)..(19): Lactam bridge connecting residues 15 and 19
  MISC_FEATURE (22)..(22): Xaa is Met, Leu or Nle
  MISC_FEATURE (23)..(23): Xaa is Asn, Asp or Glu
  MOD_RES (24)..(24): C-terminal alpha carboxylate replaced with amide
FTSDYSKYLXXRRAKDFVEWLXXT

SEQ ID NO: 1419 - protein, 24 aa, Artificial Sequence
  Synthetic Polypeptide
  MISC_FEATURE: Glucagon analogue
  MOD_RES (1)..(1): N-terminal amino group replaced with hydroxy group
  MISC_FEATURE (10)..(10): Xaa is Asp or Glu
  MISC_FEATURE (11)..(11): Xaa is Ser or Glu
  MISC_FEATURE (19)..(23): Lactam bridge connecting residues 19 and 23
  MISC_FEATURE (22)..(22): Xaa is Met, Leu or Nle
  MISC_FEATURE (24)..(24): Xaa is Thr or Glu
  MOD_RES (24)..(24): C-terminal alpha carboxylate replaced with amide
FTSDYSKYLXXRRAQDFVEWLXKX

SEQ ID NO: 1420 - protein, 24 aa, Artificial Sequence
  Synthetic Polypeptide
  MISC_FEATURE: Glucagon analogue
  MOD_RES (1)..(1): N-terminal amino group replaced with hydroxy group
  MISC_FEATURE (4)..(4): Xaa is aspartic acid, glutamic acid, cysteic acid or homocysteic acid
  MISC_FEATURE (7)..(7): Xaa is Lys or Glu
  MISC_FEATURE (10)..(10): Xaa is Asp, Glu, cysteic acid, homoglutamic acid or homocysteic acid
  MISC_FEATURE (11)..(11): Xaa is Ala, Ser, Glu, Lys Gln, homoglutamic acid or homocysteine
  MISC_FEATURE (15)..(15): Xaa is Arg, Gln, Glu or Lys
  MISC_FEATURE (19)..(19): Xaa is Ala, Gln, Lys or Glu
  MISC_FEATURE (22)..(22): Xaa is Met, Leu or Nle
  MISC_FEATURE (23)..(23): Xaa is Asn, Lys, Asp, Glu, cysteic acid or homocysteic acid
  MISC_FEATURE (24)..(24): Xaa is Thr, Asp, Glu, cysteic acid and homocysteic acid
FTSXYSXYLXXRRAXDFVXWLXXX

SEQ ID NO: 1421 - protein, 10 aa, Artificial Sequence
  Synthetic Polypeptide
  MISC_FEATURE: Peptide fragment representing the carboxy terminal 10 amino acids of Exendin-4
GPSSGAPPPS

SEQ ID NO: 1422 - protein, 24 aa, Artificial Sequence
  Synthetic Polypeptide
  MISC_FEATURE: Glucagon analogue
  MOD_RES (1)..(1): N-terminal amino group replaced with hydroxy group
  MISC_FEATURE (4)..(4): Xaa is aspartic acid, glutamic acid, cysteic acid or homocysteic acid
  MISC_FEATURE (7)..(11): Lactam bridge connecting residues 7 and 11
  MISC_FEATURE (10)..(10): Xaa is Asp, Glu, cysteic acid, homoglutamic acid and homocysteic acid
  MISC_FEATURE (22)..(22): Xaa is Met, Leu or Nle
FTSXYSKYLXERRAQDFVQWLXNT

SEQ ID NO: 1423 - protein, 24 aa, Artificial Sequence
  Synthetic Polypeptide
  MISC_FEATURE: Glucagon analogue
  MOD_RES (1)..(1): N-terminal amino group replaced with hydroxy group
  MISC_FEATURE (4)..(4): Xaa is aspartic acid, glutamic acid, cysteic acid or homocysteic acid
  MISC_FEATURE (10)..(10): Xaa is Asp, Glu, cysteic acid, homoglutamic acid and homocysteic acid
  MISC_FEATURE (11)..(15): Lactam bridge connecting residues 11 and 15
  MISC_FEATURE (22)..(22): Xaa is Met, Leu or Nle
FTSXYSKYLXERRAKDFVQWLXNT

SEQ ID NO: 1424 - protein, 24 aa, Artificial Sequence
  Synthetic Polypeptide
  MISC_FEATURE: Glucagon analogue
  MOD_RES (1)..(1): N-terminal amino group replaced with hydroxy group
  MISC_FEATURE (4)..(4): Xaa is aspartic acid, glutamic acid, cysteic acid or homocysteic acid
  MISC_FEATURE (10)..(10): Xaa is Asp, Glu, cysteic acid, homoglutamic acid and homocysteic acid
  MISC_FEATURE (15)..(19): Lactam bridge connecting residues 15 and 19
  MISC_FEATURE (22)..(22): Xaa is Met, Leu or Nle
FTSXYSKYLXERRAKDFVEWLXNT

SEQ ID NO: 1425 - protein, 24 aa, Artificial Sequence
  Synthetic Polypeptide
  MISC_FEATURE: Glucagon analogue
  MOD_RES (1)..(1): N-terminal amino group replaced with hydroxy group
  MISC_FEATURE (4)..(4): Xaa is aspartic acid, glutamic acid, cysteic acid or homocysteic acid
  MISC_FEATURE (10)..(10): Xaa is Asp, Glu, cysteic acid, homoglutamic acid and homocysteic acid
  MISC_FEATURE (19)..(24): Lactam bridge connecting residues 19 and 24
  MISC_FEATURE (22)..(22): Xaa is Met, Leu or Nle
FTSXYSKYLXERRAQDFVEWLXKT

SEQ ID NO: 1426 - protein, 8 aa, Artificial Sequence
  Synthetic Polypeptide
  MISC_FEATURE: Peptide fragment representing the carboxy terminal 8 amino acids of oxyntomodulin
KRNRNNIA

SEQ ID NO: 1427 - protein, 4 aa, Artificial Sequence
  Synthetic Polypeptide
  MISC_FEATURE: Peptide fragment representing the carboxy 4 amino acids of oxyntomodulin carboxy terminus
KRNR

SEQ ID NO: 1428 - protein, 34 aa, Artificial Sequence
  Synthetic Polypeptide
  MISC_FEATURE: Glucagon analogue
FTSEYSKYLDERRAQDFVQWLMNTGPSSGAPPPS

SEQ ID NO: 1429 - protein, 34 aa, Artificial Sequence; identical to SEQ ID NO: 1428
  Synthetic Polypeptide
  MISC_FEATURE (7)..(11): Lactam bridge connecting residues 7 and 11

SEQ ID NO: 1430 - protein, 34 aa, Artificial Sequence
  Synthetic Polypeptide
  MISC_FEATURE: Glucagon analogue
  MISC_FEATURE (11)..(15): Lactam bridge connecting residues 11 and 15
FTSEYSKYLDERRAKDFVQWLMNTGPSSGAPPPS

SEQ ID NO: 1431 - protein, 34 aa, Artificial Sequence
  Synthetic Polypeptide
  MISC_FEATURE: Glucagon analogue
  MISC_FEATURE (7)..(11): Lactam bridge connecting residues 7 and 11
FTSDYSKYLDERRAQDFVQWLMNTGPSSGAPPPS

SEQ ID NO: 1432 - protein, 34 aa, Artificial Sequence; identical to SEQ ID NO: 1428
  Synthetic Polypeptide
  MISC_FEATURE: Glucagon analogue
  MOD_RES (1)..(1): N-terminal amino group replaced with hydroxy group
  MISC_FEATURE (7)..(11): Lactam bridge connecting residues 7 and 11

SEQ ID NO: 1433 - protein, 34 aa, Artificial Sequence; identical to SEQ ID NO: 1430
  Synthetic Polypeptide
  MISC_FEATURE: Glucagon analogue
  MOD_RES (1)..(1): N-terminal amino group replaced with hydroxy group
  MISC_FEATURE (11)..(15): Lactam bridge connecting residues 11 and 15

SEQ ID NO: 1434 - protein, 24 aa, Artificial Sequence
  Synthetic Polypeptide
  MISC_FEATURE: Glucagon analogue
  MOD_RES (1)..(1): N-terminal amino group replaced with hydroxy group
FTSDYSKYLDSRRAQDFVQWLMDT

SEQ ID NO: 1435 - protein, 24 aa, Artificial Sequence
  Synthetic Polypeptide
  MISC_FEATURE: Glucagon analogue
  MOD_RES (1)..(1): N-terminal amino group replaced with hydroxy group
  MISC_FEATURE (7)..(11): Lactam bridge connecting residues 7 and 11
FTSEYSKYLDERRAQDFVQWLMNT

SEQ ID NO: 1436 - protein, 24 aa, Artificial Sequence
  Synthetic Polypeptide
  MISC_FEATURE: Glucagon analogue
  MOD_RES (1)..(1): N-terminal amino group replaced with hydroxy group
  MISC_FEATURE (11)..(15): Lactam bridge connecting residues 11 and 15
FTSEYSKYLDERRAKDFVQWLMNT

SEQ ID NO: 1437 - protein, 31 aa, Artificial Sequence
  Synthetic Polypeptide
  MISC_FEATURE: Glucagon analogue
HSQGTFTSDYARYLDARRAREFIKWLVRGRG

SEQ ID NO: 1438 - protein, 24 aa, Artificial Sequence
  Synthetic Polypeptide
  MISC_FEATURE: Glucagon analogue
  MOD_RES (1)..(1): N-terminal amino group replaced with hydroxy group
  MOD_RES (24)..(24): C-terminal alpha carboxylate replaced with amide
FTSDYSKYLDERRAQDFVQWLMNT

SEQ ID NO: 1439 - protein, 24 aa, Artificial Sequence
  Synthetic Polypeptide
  MISC_FEATURE: Glucagon analogue
  MOD_RES (1)..(1): N-terminal amino group replaced with hydroxy group
  MISC_FEATURE (4)..(4): Xaa is aspartic acid, glutamic acid, cysteic acid or homocysteic acid
  MISC_FEATURE (10)..(10): Xaa is Asp, Glu, cysteic acid, homoglutamic acid or homocysteic acid
  MISC_FEATURE (22)..(22): Xaa is Met, Leu or Nle
  MOD_RES (24)..(24): C-terminal alpha carboxylate replaced with amide
FTSXYSKYLXERRAKDFVQWLXNT

SEQ ID NO: 1440 - protein, 29 aa, Artificial Sequence
  Synthetic Polypeptide
  MISC_FEATURE: Glucagon analogue
HSQGTFTSDYSKYLDSCRAQDFVQWLMNT

SEQ ID NO: 1441 - protein, 39 aa, Artificial Sequence; identical to SEQ ID NO: 36
  Synthetic Polypeptide
  MISC_FEATURE: Glucagon Analogue

SEQ ID NO: 1442 - protein, 29 aa, Artificial Sequence
  Synthetic Polypeptide
  MISC_FEATURE: Glucagon analogue
  MOD_RES (24)..(24): 2-butyrolactone bound through thiol group of Cysteine
HSQGTFTSDYSKYLDSRRAQCFVQWLMNT

SEQ ID NO: 1443 - protein, 29 aa, Artificial Sequence
  Synthetic Polypeptide
  MISC_FEATURE: Glucagon Analogue
  MOD_RES (21)..(21): Carboxymethyl group bound through thiol group of Cysteine
HSQGTFTSDYSKYLDSRRAQCFVQWLMNT

SEQ ID NO: 1444 - protein, 39 aa, Homo sapiens
HSQGTFTSDYSRYLDSRRAQDFVQWLRNTGPSSGAPPPS

SEQ ID NO: 1445 - protein, 35 aa, Artificial Sequence; identical to SEQ ID NO: 1346
  Synthetic Polypeptide
  MISC_FEATURE: Glucagon analogue
  MOD_RES (1)..(1): N-terminal amino group replaced with hydroxy group
  MISC_FEATURE (4)..(4): Xaa is aspartic acid, glutamic acid, cysteic acid or homocysteic acid
  MISC_FEATURE (7)..(11): Lactam bridge connecting residues 7 and 11
  MISC_FEATURE (10)..(10): Xaa is Asp, Glu, cysteic acid, homoglutamic acid or homocysteic acid
  MISC_FEATURE (22)..(22): Xaa is Met, Leu or Nle
  MISC_FEATURE (23)..(23): Xaa is Asn, Lys, Asp, Glu, cysteic acid and homocysteic acid
  MISC_FEATURE (24)..(24): Xaa is Thr, Asp, Glu, cysteic acid and homocysteic acid
  MISC_FEATURE (25)..(25): Xaa is Cys, Orn, homocysteine or acetyl phenyalanine
  MOD_RES (25)..(25): Pegylated

SEQ ID NO: 1446 - protein, 35 aa, Artificial Sequence; identical to SEQ ID NO: 1347
  Synthetic Polypeptide
  MISC_FEATURE: Glucagon analogue
  MOD_RES (1)..(1): N-terminal amino group replaced with hydroxy group
  MISC_FEATURE (4)..(4): Xaa is aspartic acid, glutamic acid, cysteic acid or homocysteic acid
  MISC_FEATURE (10)..(10): Xaa is Asp, Glu, cysteic acid, homoglutamic acid or homocysteic acid
  MISC_FEATURE (11)..(15): Lactam bridge connecting residues 11 and 15
  MISC_FEATURE (22)..(22): Xaa is Met, Leu or Nle
  MISC_FEATURE (23)..(23): Xaa is Asn, Lys, Asp, Glu, cysteic acid and homocysteic acid
  MISC_FEATURE (24)..(24): Xaa is Thr, Asp, Glu, cysteic acid and homocysteic acid
  MISC_FEATURE (35)..(35): Xaa is Cys, Orn, homocysteine or acetyl phenyalanine
  MOD_RES (35)..(35): Pegylated

SEQ ID NO: 1447 - protein, 24 aa, Artificial Sequence
  Synthetic Polypeptide
  MISC_FEATURE: Glucagon analogue
  MISC_FEATURE (4)..(4): Xaa is glutamic acid, homoglutamic acid, cysteic acid or homocysteic acid
  MISC_FEATURE (7)..(11): Lactam bridge connecting residues 7 and 11
  MISC_FEATURE (10)..(10): Xaa is Glu or Asp
  MISC_FEATURE (22)..(22): Xaa is Met, Leu or Nle
  MISC_FEATURE (23)..(23): Xaa is Asn, Asp or Glu
FTSXYSKYLXERRAQDFVQWLXXT

SEQ ID NO: 1448 - protein, 24 aa, Artificial Sequence
  Synthetic Polypeptide
  MISC_FEATURE: Glucagon analogue
  MISC_FEATURE (4)..(4): Xaa is glutamic acid, homoglutamic acid,  cysteic acid or homocysteic acid
  MISC_FEATURE (10)..(10): Xaa is Asp or Glu
  MISC_FEATURE (11)..(15): Lactam bridge connecting residues 11 and 15
  MISC_FEATURE (22)..(22): Xaa is Met, Leu or Nle
  MISC_FEATURE (23)..(23): Xaa is Asn, Asp or Glu
FTSXYSKYLXERRAKDFVQWLXXT

SEQ ID NO: 1449 - protein, 23 aa, Artificial Sequence
  Synthetic Polypeptide
  MISC_FEATURE: Glucagon analogue
TSDYSKYLDERRAKDFVQWLMDT

SEQ ID NO: 1450 - protein, 11 aa, Artificial Sequence
  Synthetic Polypeptide
  MISC_FEATURE: Peptide fragment representing the carboxy terminal 10 amino acids of Exendin-4 plus one additional amino acid
  MISC_FEATURE (11)..(11): Xaa is selected form the group consisting of Cys, Orn, Lys, homocysteine and acetyl phenyalanine
GPSSGAPPPSX

SEQ ID NO: 1451 - protein, 24 aa, Artificial Sequence
  Synthetic Polypeptide
  MISC_FEATURE: Glucagon analogue
  MOD_RES (1)..(1): N-terminal amino group replaced with hydroxy group
  MISC_FEATURE (4)..(4): Xaa is aspartic acid, glutamic acid, cysteic acid, homoglutamic acid or homocysteic acid
  MISC_FEATURE (7)..(7): Xaa is Lys or Glu
  MISC_FEATURE (10)..(10): Xaa is Asp, Glu, cysteic acid, homoglutamic acid or homocysteic acid
  MISC_FEATURE (11)..(11): Xaa is Ala, Ser, Glu, Lys Gln, homoglutamic acid or homocysteic acid
  MISC_FEATURE (15)..(15): Xaa is Arg, Gln, Glu or Lys
  MISC_FEATURE (19)..(19): Xaa is Ala, Gln, Lys or Glu
  MISC_FEATURE (22)..(22): Xaa is Met, Leu or Nle
  MISC_FEATURE (23)..(23): Xaa is Asn, Lys or an acidic amino acid
  MISC_FEATURE (24)..(24): Xaa is Thr, Gly or an acidic amino acid
FTSXYSXYLXXRRAXDFVXWLXXX

SEQ ID NO: 1452 - protein, 6 aa, Artificial Sequence
  Synthetic Polypeptide
  MISC_FEATURE (6)..(6): Xaa is phenyl lactic acid
HSQGTX

SEQ ID NO: 1453 - protein, 5 aa, Artificial Sequence
  Synthetic Polypeptide
  MISC_FEATURE (5)..(5): Xaa is phenyl lactic acid
SQGTX

SEQ ID NO: 1454 - protein, 4 aa, Artificial Sequence
  Synthetic Polypeptide
  MISC_FEATURE (4)..(4): Xaa is phenyl lactic acid
QGTX

SEQ ID NO: 1455 - protein, 3 aa, Artificial Sequence
  Synthetic Polypeptide
  MISC_FEATURE (3)..(3): Xaa is phenyl lactic acid
GTX

SEQ ID NO: 1456 - protein, 2 aa, Artificial Sequence
  Synthetic Polypeptide
  MISC_FEATURE (2)..(2): Xaa is phenyl lactic acid
TX

SEQ ID NO: 1457 - protein, 6 aa, Artificial Sequence
  Synthetic Polypeptide
  MISC_FEATURE (1)..(1): Xaa is selected from a group consisting of His, D-histidine, alpha, alpha-dimethyl imidiazole acetic acid (DMIA), N-methyl histidine, alpha-methyl histidine, imidazole acetic acid, desaminohistidine, hydroxyl-histidine, acetyl-histidine and
  MISC_FEATURE (2)..(2): Xaa is selected from a group consisting of Ser, D-serine, D-alanine, Val, Gly, N-methyl serine, N-methyl alanine, and aminoisobutyric acid (AIB)
  MISC_FEATURE (3)..(3): Xaa is selected from a group consisting of Glu or Gln
  MISC_FEATURE (6)..(6): Xaa is phenyl lactic acid
XXXGTX

SEQ ID NO: 1458 - protein, 5 aa, Artificial Sequence
  Synthetic Polypeptide
  MISC_FEATURE (1)..(1): Xaa is selected from a group consisting of Ser, D-serine, D-alanine, Val, Gly, N-methyl serine, N-methyl alanine, and aminoisobutyric acid (AIB)
  MISC_FEATURE (2)..(2): Xaa is selected from a group consisting of Glu or Gln
  MISC_FEATURE (5)..(5): Xaa is phenyl lactic acid
XXGTX

SEQ ID NO: 1459 - protein, 4 aa, Artificial Sequence
  Synthetic Polypeptide
  MISC_FEATURE (1)..(1): Xaa is selected from a group consisting of Glu or Gln
  MISC_FEATURE (4)..(4): Xaa is phenyl lactic acid
XGTX

SEQ ID NO: 1460 - protein, 24 aa, Artificial Sequence
  Synthetic Polypeptide
  MOD_RES (1)..(1): N-terminal amino group replaced with hydroxy group
  MISC_FEATURE (11)..(15): Lactam bridge connecting residues 11 and 15
  MOD_RES (24)..(24): C-terminal alpha carboxylate replaced with amide
FTSDYSKYLDERRAKDFVQWLMDT

SEQ ID NO: 1461 - protein, 24 aa, Artificial Sequence
  Synthetic Polypeptide
  MOD_RES (1)..(1): N-terminal amino group replaced with hydroxy group
  MOD_RES (24)..(24): C-terminal alpha carboxylate replaced with amide
FTSEYSKYLDSRRAQDFVQWLMNT

SEQ ID NO: 1462 - protein, 24 aa, Artificial Sequence
  Synthetic Polypeptide
  MOD_RES (1)..(1): N-terminal amino group replaced with hydroxy group
  MISC_FEATURE (4)..(7): Lactam bridge connecting residues 4 and 7
  MOD_RES (24)..(24): C-terminal alpha carboxylate replaced with amide
FTSEYSKYLDSRRAQDFVQWLMNT

SEQ ID NO: 1463 - protein, 28 aa, Artificial Sequence
  Synthetic Polypeptide
  MISC_FEATURE (15)..(19): Lactam bridge connecting residues 15 and 19
  MOD_RES (28)..(28): C-terminal alpha carboxylate replaced with amide
AEGTFTSEYSKYLDERRAKDFVQWLMDT

SEQ ID NO: 1464 - protein, 28 aa, Artificial Sequence
  Synthetic Polypeptide
  MISC_FEATURE (4)..(5): Threonine in position 4 and phenyl lactic acid in position 5 are linked via ester bond
  MISC_FEATURE (5)..(5): Xaa is phenyl lactic acid
  MISC_FEATURE (15)..(19): Lactam bridge connecting residues 15 and 19
  MOD_RES (28)..(28): C-terminal alpha carboxylate replaced with amide
AEGTXTSDYSKYLDERRAKDFVQWLMDT

SEQ ID NO: 1465 - protein, 28 aa, Artificial Sequence
  Synthetic Polypeptide
  MISC_FEATURE (15)..(19): Lactam bridge connecting residues 15 and 19
  MOD_RES (28)..(28): C-terminal alpha carboxylate replaced with amide
SQGTFTSEYSKYLDERRAKDFVQWLMDT

SEQ ID NO: 1466 - protein, 28 aa, Artificial Sequence
  Synthetic Polypeptide
  MISC_FEATURE (4)..(5): Threonine in position 4 and phenyl lactic acid in position 5 are linked via ester bond
  MISC_FEATURE (5)..(5): Xaa is phenyl lactic acid
  MISC_FEATURE (15)..(19): Lactam bridge connecting residues 15 and 19
  MOD_RES (28)..(28): C-terminal alpha carboxylate replaced with amide
SQGTXTSDYSKYLDERRAKDFVQWLMDT

SEQ ID NO: 1467 - protein, 24 aa, Artificial Sequence
  Synthetic Polypeptide
  MOD_RES (1)..(1): N-terminal amino group replaced with hydroxy group
  MISC_FEATURE (5)..(5): Covalently linked to a cholesterol acid moiety
  MISC_FEATURE (11)..(15): Lactam bridge connecting residues 11 to 15
  MOD_RES (24)..(24): C-terminal alpha carboxylate replaced with amide
FTSDKSKYLDERRAKDFVQWLMDT

SEQ ID NO: 1468 - protein, 25 aa, Artificial Sequence
  Synthetic Polypeptide
  MOD_RES (1)..(1): N-terminal amino group replaced with hydroxy group
  MISC_FEATURE (11)..(15): Lactam bridge connecting residues 11 and 15
  MISC_FEATURE (25)..(25): Covalently linked to a cholesterol acid moiety
  MOD_RES (25)..(25): C-terminal alpha carboxylate replaced with amide
FTSDYSKYLDERRAKDFVQWLMDTK

SEQ ID NO: 1469 - protein, 35 aa, Artificial Sequence
  Synthetic Polypeptide
  MOD_RES (1)..(1): N-terminal amino group replaced with hydroxy group
  MISC_FEATURE (11)..(15): Lactam bridge connectiong residues 11 and 15
  MISC_FEATURE (35)..(35): Covalently linked to a cholesterol acid moiety
  MOD_RES (35)..(35): C-terminal alpha carboxylate replaced with amide
FTSDYSKYLDERRAKDFVQWLMDTGPSSGAPPPSK

SEQ ID NO: 1470 - protein, 28 aa, Artificial Sequence
  Synthetic Polypeptide
  MISC_FEATURE (1)..(1): Xaa is amino isobutyric acid
  MISC_FEATURE (4)..(5): Threonine in position 4 and phenyl lactic acid in position 5 are linked via ester bond
  MISC_FEATURE (5)..(5): Xaa is phenyl lactic acid
  MISC_FEATURE (15)..(19): Lactam bridge connectiong residues 15 and 19
  MOD_RES (28)..(28): C-terminal alpha carboxylate replaced with amide
XEGTXTSDYSKYLDERRAKDFVQWLMDT

SEQ ID NO: 1471 - protein, 34 aa, Artificial Sequence; identical to SEQ ID NO: 1428
  Synthetic Polypeptide
  MOD_RES (34)..(34): C-terminal alpha carboxylate replaced with amide

SEQ ID NO: 1472 - protein, 34 aa, Artificial Sequence; identical to SEQ ID NO: 1428
  Synthetic Polypeptide
  MOD_RES (1)..(1): N-terminal amino group replaced with hydroxy group
  MOD_RES (34)..(34): C-terminal alpha carboxylate replaced with amide

SEQ ID NO: 1473 - protein, 34 aa, Artificial Sequence; identical to SEQ ID NO: 1430
  Synthetic Polypeptide
  MISC_FEATURE (11)..(15): Lactam bridge connecting residues 11 and 15
  MOD_RES (34)..(34): C-terminal alpha carboxylate replaced with amide

SEQ ID NO: 1474 - protein, 34 aa, Artificial Sequence; identical to SEQ ID NO: 1430
  Synthetic Polypeptide
  MOD_RES (1)..(1): N-terminal amino group replaced with hydroxy group
  MISC_FEATURE (11)..(15): Lactam bridge connecting residues 11 and 15
  MOD_RES (34)..(34): C-termincal alpha carboxylate replaced with amide

SEQ ID NO: 1475 - protein, 24 aa, Artificial Sequence
  Synthetic Polypeptide
  MOD_RES (1)..(1): N-terminal amino group replaced with hydroxy group
  MISC_FEATURE (7)..(11): Lactam bridge connecting residues 7 and 11
  MOD_RES (24)..(24): C-terminal alpha carboxylate replaced with amide
FTSDYSKYLDERRAQDFVQWLMDT

SEQ ID NO: 1476 - protein, 24 aa, Artificial Sequence
  Synthetic Polypeptide
  MOD_RES (1)..(1): N-terminal amino group replaced with hydroxy group
  MISC_FEATURE (11)..(15): Lactam bridge connecting residues 11 and 15
  MOD_RES (24)..(24): C-terminal alpha carboxylate replaced with amide
FTSDYSKYLDERRAKDFVQWLMDT

SEQ ID NO: 1477 - protein, 24 aa, Artificial Sequence
  Synthetic Polypeptide
  MOD_RES (1)..(1): N-terminal amino group replaced with hydroxy group
  MISC_FEATURE (15)..(19): Lactam bridge connecting residues 15 and 19
  MOD_RES (24)..(24): C-terminal alpha carboxylate replaced with amide
FTSDYSKYLDERRAKDFVEWLMDT

SEQ ID NO: 1478 - protein, 24 aa, Artificial Sequence
  Synthetic Polypeptide
  MOD_RES (1)..(1): N-terminal amino group replaced with hydroxy group
  MISC_FEATURE (19)..(23): Lactam bridge connecting residues 19 and 23
  MOD_RES (24)..(24): C-terminal alpha carboxylate replaced with amide
FTSDYSKYLDERRAQDFVEWLMKT

SEQ ID NO: 1479 - protein, 24 aa, Artificial Sequence
  Synthetic Polypeptide
  MOD_RES (1)..(1): N-terminal amino group replaced with hydroxy group
  MISC_FEATURE (7)..(11): Lactam bridge connecting residues 7 and 11
  MOD_RES (24)..(24): C-terminal alpha carboxylate replaced with amide
FTSDYSKYLDEQAAKDFIAWLMDT

SEQ ID NO: 1480 - protein, 24 aa, Artificial Sequence
  Synthetic Polypeptide
  MOD_RES (1)..(1): N-terminal amino group replaced with hydroxy group
  MISC_FEATURE (11)..(15): Lactam bridge connecting residues 11 and 15
  MOD_RES (24)..(24): C-terminal alpha carboxylate replaced with amide
FTSDYSKYLDEQAAKEFIAWLMDT

SEQ ID NO: 1481 - protein, 28 aa, Artificial Sequence
  Synthetic Polypeptide
  MISC_FEATURE (15)..(19): Lactam bridge connecting residues 15 and 19
  MOD_RES (28)..(28): C-terminal alpha carboxylate replaced with amide
AEGTFTSEYSKYLDERRAKDFVQWLMDT

SEQ ID NO: 1482 - protein, 28 aa, Artificial Sequence
  Synthetic Polypeptide
  MISC_FEATURE (15)..(19): Lactam bridge connecting residues 15 and 19
  MOD_RES (28)..(28): C-terminal alpha carboxylate replaced with amide
AEGTFTSEYSKYLDEQAAKEFIAWLMDT

SEQ ID NO: 1483 - protein, 29 aa, Artificial Sequence
  Synthetic Polypeptide
  MISC_FEATURE (16)..(20): Lactam bridge connection residues 16 and 20
  MOD_RES (29)..(29): C-terminal alpha carboxylate replaced with amide
HAEGTFTSEYSKYLDERRAKDFVQWLMDT

SEQ ID NO: 1484 - protein, 29 aa, Artificial Sequence
  Synthetic Polypeptide
  MISC_FEATURE (16)..(20): Lactam bridge connecting bridges 16 and 20
  MOD_RES (29)..(29): C-terminal alpha carboxylate replaced with amide
HAEGTFTSEYSKYLDEQAAKEFIAWLMDT

SEQ ID NO: 1485 - protein, 26 aa, Artificial Sequence
  Synthetic Polypeptide
  MISC_FEATURE (13)..(17): Lactam bridge connecting residues 13 and 17
  MOD_RES (26)..(26): C-terminal alpha carboxylate replaced with amide
GTFTSEYSKYLDERRAKDFVQWLMDT

SEQ ID NO: 1486 - protein, 28 aa, Artificial Sequence
  Synthetic Polypeptide
  MISC_FEATURE (5)..(6): Threonine in position 5 and phenyl lactic acid in position 6 linked via ester bond
  MISC_FEATURE (15)..(19): Lactam bridge connecting residues 15 and 19
  MOD_RES (28)..(28): C-terminal alpha carboxylate replaced with amide
SQGTFTSEYSKYLDERRAKDFVQWLMDT

SEQ ID NO: 1487 - protein, 29 aa, Artificial Sequence
  Synthetic Polypeptide
  MISC_FEATURE (5)..(6): Threonine at position 5 and phenyl lactic acid at position 6 linked via ester bond
  MISC_FEATURE (6)..(6): Xaa is phenyl lactic acid
  MISC_FEATURE (16)..(20): Lactam bridge connecting residues 16 and 20
  MOD_RES (29)..(29): C-terminal alpha carboxylate replaced with amide
HAEGTXTSDYSKYLDERRAKDFVQWLMDT

SEQ ID NO: 1488 - protein, 24 aa, Artificial Sequence
  Synthetic Polypeptide
  MOD_RES (1)..(1): N-terminal amino group replaced with hydroxy group
  MISC_FEATURE (7)..(11): Lactam bridge connecting residues 7 and 11
  MOD_RES (19)..(19): Pegylated
  MOD_RES (24)..(24): C-terminal alpha carboxylate replaced with amide
FTSDYSKYLDERRAQDFVCWLMDT

SEQ ID NO: 1489 - protein, 35 aa, Artificial Sequence
  Synthetic Polypeptide
  MOD_RES (1)..(1): N-terminal amino group replaced with hydroxy group
  MISC_FEATURE (7)..(11): Lactam bridge connecting residues 7 and 11
  MOD_RES (35)..(35): Pegylated
  MOD_RES (35)..(35): C-terminal alpha carboxylate replaced with amide
FTSDYSKYLDERRAQDFVQWLMDTGPSSGAPPPSC

SEQ ID NO: 1490 - protein, 24 aa, Artificial Sequence
  Synthetic Polypeptide
  MOD_RES (1)..(1): N-terminal amino group replaced with hydroxy group
  MISC_FEATURE (11)..(15): Lactam bridge connecting residues 11 and 15
  MOD_RES (19)..(19): Pegylated
  MOD_RES (24)..(24): C-terminal alpha carboxylate replaced with amide
FTSDYSKYLDERRAKDFVCWLMDT

SEQ ID NO: 1491 - protein, 35 aa, Artificial Sequence
  Synthetic Polypeptide
  MOD_RES (1)..(1): N-terminal amino group replaced with hydroxy group
  MISC_FEATURE (11)..(15): Lactam bridge connecting residues 11 and 15
  MOD_RES (35)..(35): Pegylated
  MOD_RES (35)..(35): C-terminal alpha carboxylate replaced with amide
FTSDYSKYLDERRAKDFVQWLMDTGPSSGAPPPSC

SEQ ID NO: 1492 - protein, 24 aa, Artificial Sequence
  Synthetic Polypeptide
  MOD_RES (1)..(1): N-terminal amino group replaced with hydroxy group
  MOD_RES (1)..(1): Covalently attached to a C16 fatty acid
  MISC_FEATURE (11)..(15): Lactam bridge connection residues 11 and 15
  MOD_RES (24)..(24): C-terminal alpha carboxylate replaced with amide
FTSDYSKYLDERRAKDFVQWLMDT

SEQ ID NO: 1493 - protein, 24 aa, Artificial Sequence
  Synthetic Polypeptide
  MOD_RES (1)..(1): N-terminal amino group replaced with hydroxy group
  MOD_RES (5)..(5): Linked to a C16 fatty acid via Glu residue
  MISC_FEATURE (11)..(15): Lactam bridge connecting residues 11 and 15
  MISC_FEATURE (15)..(15): Linked to a C16 fatty acid via Glu residue
  MOD_RES (24)..(24): C-terminal alpha carboxylate replaced with amide
FTSDKSKYLDERRAKDFVQWLMDT

SEQ ID NO: 1494 - protein, 24 aa, Artificial Sequence
  Synthetic Polypeptide
  MOD_RES (1)..(1): N-terminal amino group replaced with hydroxy group
  MISC_FEATURE (15)..(15): Linked to C16 fatty acid via Glu residue
  MOD_RES (24)..(24): C-terminal alpha carboxylate replaced with amide
FTSDYSKYLDERRAKDFVQWLMDT

SEQ ID NO: 1495 - protein, 24 aa, Artificial Sequence
  Synthetic Polypeptide
  MOD_RES (1)..(1): N-terminal amino group replaced with hydroxy group
  MISC_FEATURE (11)..(15): Lactam bridge connecting residues 11 and 15
  MISC_FEATURE (19)..(19): Linked to a C16 fatty acid via Glu residue
  MOD_RES (24)..(24): C-terminal alpha carboxylate replaced with amide
FTSDYSKYLDERRAKDFVKWLMDT

SEQ ID NO: 1496 - protein, 24 aa, Artificial Sequence
  Synthetic Polypeptide
  MOD_RES (1)..(1): N-terminal amino group replaced with hydroxy group
  MISC_FEATURE (11)..(15): Lactam bridge connecting residues 11 and 15
  MISC_FEATURE (24)..(24): Linked to a C16 fatty acid via Glu residue
  MOD_RES (24)..(24): C-terminal alpha carboxylate replaced with amide
FTSDYSKYLDERRAKDFVQWLMDK

SEQ ID NO: 1497 - protein, 24 aa, Artificial Sequence
  Synthetic Polypeptide
  MOD_RES (1)..(1): N-terminal amino group replaced with hydroxy group
  MISC_FEATURE (11)..(11): Xaa is amino isobutyric acid
  MOD_RES (24)..(24): C-terminal alpha carboxylate replaced with amide
FTSDYSKYLDXRRAQDFVQWLMNT

SEQ ID NO: 1498 - protein, 24 aa, Artificial Sequence
  Synthetic Polypeptide
  MOD_RES (1)..(1): N-terminal amino group replaced with hydroxy group
  MISC_FEATURE (11)..(11)
  MISC_FEATURE (15)..(15): Xaa is alpha isobutyric acid
  MOD_RES (24)..(24): C-terminal alpha carboxylate replaced with amide
FTSDKSKYLDXRRAXDFVCWLMNT

SEQ ID NO: 1499 - protein, 24 aa, Artificial Sequence
  Synthetic Polypeptide
  MOD_RES (1)..(1): N-terminal amino group replaced with hydroxy group
  MOD_RES (24)..(24): C-terminal alpha carboxylate replaced with amide
FTSDYSKYLDERRAQDFVQWLMNT

SEQ ID NO: 1500 - protein, 24 aa, Artificial Sequence
  Synthetic Polypeptide
  MOD_RES (1)..(1): N-terminal amino group replaced with hydroxy group
  MOD_RES (24)..(24): C-terminal alpha carboxylate replaced with amide
FTSDKSKYLDERRAQDFVCWLMNT

SEQ ID NO: 1501 - protein, 24 aa, Artificial Sequence
  Synthetic Polypeptide
  MISC_FEATURE (4)..(7): Lactam bridge connecting residues 4 and 7
  MOD_RES (11)..(11): Xaa is alpha isobutyric acid
  MOD_RES (24)..(24): C-terminal carboxylate replaced with amide
FTSEYSKYLDXRRAQDFVQWLMNT

SEQ ID NO: 1502 - protein, 24 aa, Artificial Sequence
  Synthetic Polypeptide
  MISC_FEATURE (4)..(7): Lactam bridge connecting residues 4 and 7
  MOD_RES (11)..(11): Xaa is alpha isobutyric acid
  MOD_RES (24)..(24): C-terminal carboxylate replaced with amide
FTSEYSKYLDXRRAQDFVQWLMNT

SEQ ID NO: 1503 - protein, 24 aa, Artificial Sequence
  Synthetic Polypeptide
  MOD_RES (1)..(1): N-terminal amino group replaced with hydroxy group
  MISC_FEATURE (11)..(15): Lactam bridge connecting residues 11 and 15
  MOD_RES (24)..(24): C-terminal alpha carboxylate replaced with amide
FTSDYSKYLDERRAKEFVQWLMDT

SEQ ID NO: 1504 - protein, 24 aa, Artificial Sequence
  Synthetic Polypeptide
  MOD_RES (1)..(1): N-terminal amino group replaced with hydroxy group
  MOD_RES (24)..(24): C-terminal alpha carboxylate replaced with amide
FTSDYSKYLDEQAAKEFIAWLMNT

SEQ ID NO: 1505 - protein, 34 aa, Artificial Sequence; identical to SEQ ID NO: 1430
  Synthetic Polypeptide
  MOD_RES (34)..(34): C-terminal alpha carboxylate replaced with amide

SEQ ID NO: 1506 - protein, 24 aa, Artificial Sequence
  Synthetic Polypeptide
  MOD_RES (1)..(1): N-terminal amino group replaced with hydroxy group
  MISC_FEATURE (5)..(5): Linked to a C16 fatty acid via Glu residue
  MISC_FEATURE (7)..(7): Linked to a C16 fatty acid via Glu residue
  MOD_RES (24)..(24): C-terminal carboxylate replaced with amide
FTSDKSKYLDERRAKDFVQWLMDT

SEQ ID NO: 1507 - protein, 6 aa, Artificial Sequence
  Synthetic Polypeptide
  MISC_FEATURE (1)..(1): Xaa1 is selected from a group consisting of His, D-histidine, alpha, alpha-dimethyl imidiazole acetic acid (DMIA), N-methyl histidine, alpha-methyl histidine, imidazole acetic acid, desaminohistidine, hydroxyl-histidine, acetyl-histidine and
  MISC_FEATURE (2)..(2): Xaa is selected from a group consisting of Ser, D-serine, D-alanine, valine, glycine, N-methyl serine, and aminoisobutyric acid (AIB)
  MISC_FEATURE (3)..(3): Xaa is selected from a group consisting of Glu or Gln
XXXTGF

SEQ ID NO: 1508 - protein, 5 aa, Artificial Sequence
  Synthetic Polypeptide
  MISC_FEATURE (1)..(1): Xaa is selected from a group consisting of Ser, D-serine, D-alanine, valine, glycine, N-methyl serine, and aminoisobutyric acid (AIB)
  MISC_FEATURE (2)..(2): Xaa is selected from a group consisting of Glu or Gln
XXTGF

SEQ ID NO: 1509 - protein, 4 aa, Artificial Sequence
  Synthetic Polypeptide
  MISC_FEATURE (1)..(1): Xaa is selected from a group consisting of Glu or Gln
XTGF

SEQ ID NO: 1510 - protein, 24 aa, Artificial Sequence
  Synthetic Polypeptide
  MOD_RES (1)..(1): N-terminal amino group replaced with hydroxy group
  MOD_RES (24)..(24): C-terminal alpha carboxylate replaced with amide
FTSDYSKYLDSRRAQDFVQWLMDT

SEQ ID NO: 1511 - protein, 28 aa, Artificial Sequence
  Synthetic Polypeptide
  MOD_RES (28)..(28): C-terminal alpha carboxylate replaced with amide
SQGTFTSEYSKYLDSRRAQDFVQWLMNT

SEQ ID NO: 1512 - protein, 28 aa, Artificial Sequence
  Synthetic Polypeptide
  MISC_FEATURE (4)..(5): Threonine at position 4 and phenyl lactic acid at position 5 linked via ester bond
  MISC_FEATURE (5)..(5): Xaa is phenyl lactic acid
  MOD_RES (28)..(28): C-terminal alpha carboxylate replaced with amide
SQGTXTSEYSKYLDSRRAQDFVQWLMNT

SEQ ID NO: 1513 - protein, 29 aa, Artificial Sequence
  Synthetic Polypeptide
  MISC_FEATURE (5)..(6): Threorine at position 5 and phenyl lactic acid at position 6 linked via ester bond
  MISC_FEATURE (6)..(6): Xaa is phenyl lactic acid
  MOD_RES (29)..(29): C-terminal alpha carboxylate replaced with amide
HSQGTXTSEYSKYLDSRRAQDFVQWLMNT

SEQ ID NO: 1514 - protein, 24 aa, Artificial Sequence
  Synthetic Polypeptide
  MOD_RES (1)..(1): N-terminal amino group replaced with hydroxy group
  MISC_FEATURE (11)..(15): Lactam bridge connecting residues 11 and 15
  MOD_RES (19)..(19): Pegylated
  MOD_RES (24)..(24): C-terminal alpha carboxylate replaced with amide
FTSEYSKYLDERRAKDFVCWLMNT

SEQ ID NO: 1515 - protein, 24 aa, Artificial Sequence
  Synthetic Polypeptide
  MOD_RES (1)..(1): N-terminal amino group replaced with hydroxy group
  MISC_FEATURE (11)..(15): Lactam bridge connecting residues 11 and 15
  MISC_FEATURE (19)..(19): Pegylated via spacer
  MOD_RES (24)..(24): C-terminal alpha carboxylate replaced with amide
FTSDYSKYLDERRAKDFVKWLMDT

SEQ ID NO: 1516 - protein, 24 aa, Artificial Sequence
  Synthetic Polypeptide
  MOD_RES (1)..(1): N-terminal amino group replaced with hydroxy group
  MISC_FEATURE (11)..(15): Lactam bridge connecting residues 11 and 15
  MOD_RES (19)..(19): Pegylated via rigid spacer
  MOD_RES (24)..(24): C-terminal alpha carboxylate replaced with amide
FTSDYSKYLDERRAKDFVKWLMDT

SEQ ID NO: 1517 - protein, 35 aa, Artificial Sequence
  Synthetic Polypeptide
  MISC_FEATURE (1)..(1): N-terminal amino group replaced with hydroxy group
  MISC_FEATURE (11)..(15): Lactam bridge connecting residues 11 and 15
  MOD_RES (35)..(35): Pegylated
  MOD_RES (35)..(35): C-terminal alpha carboxylate replaced with amide
FTSDYSKYLDERRAKDFVQWLMDTGPGPGPGPGPC

SEQ ID NO: 1518 - protein, 35 aa, Artificial Sequence
  Synthetic Polypeptide
  MOD_RES (1)..(1): N-terminal amino group replaced with hydroxy group
  MISC_FEATURE (11)..(15): Lactam bridge connecting residues 11 and 15
  MOD_RES (35)..(35): Pegylated
  MOD_RES (35)..(35): C-terminal alpha carboxylate reaplaced with amide
FTSDYSKYLDERRAKDFVQWLMDGGPSSGAPPPSC

SEQ ID NO: 1519-1700 - skipped (182 entries)

SEQ ID NO: 1701 - protein, 29 aa, Artificial Sequence
  Synthetic peptide
  MOD_RES (2)..(2): Xaa is AIB
  misc_feature (16)..(16): Xaa can be any naturally occurring amino acid
  misc_feature (20)..(20): Xaa can be any naturally occurring amino acid
  MOD_RES (29)..(29): C-terminal amidation
HSQGTFTSDYSKYLDXQAAXGFIAWLMNT

SEQ ID NO: 1702 - protein, 29 aa, Artificial Sequence
  Synthetic peptide
  MOD_RES (2)..(2): Xaa is AIB
  MOD_RES (10)..(10): Acylated with C16 fatty acyl group
  MOD_RES (16)..(16): Xaa is AIB
  MOD_RES (29)..(29): C-terminal amidation
HXQGTFTSDKSKYLDXRAAQDFVQWLMDT

SEQ ID NO: 1703 - protein, 29 aa, Artificial Sequence
  Synthetic peptide
  MOD_RES (2)..(2): Xaa is AIB
  MOD_RES (10)..(10): Acylated with C14 fatty acyl group via dipeptide spacer
  MOD_RES (16)..(16): Xaa is AIB
  MOD_RES (29)..(29): C-terminal amidation
HXQGTFTSDKSKYLDXRAAQDFVQWLMDT

SEQ ID NO: 1704 - protein, 29 aa, Artificial Sequence
  Synthetic peptide
  MOD_RES (2)..(2): Xaa is AIB
  MOD_RES (10)..(10): Acylated with C18 fatty acyl group via dipeptide spacer
  MOD_RES (16)..(16): Xaa is AIB
  MOD_RES (29)..(29): C-terminal amidation
HXQGTFTSDKSKYLDXRAAQDFVQWLMDT

SEQ ID NO: 1705 - protein, 29 aa, Artificial Sequence
  Synthetic peptide
  MOD_RES (1)..(10): Acylated with C16 fatty acyl group via dipeptide spacer
  MOD_RES (2)..(2): Xaa is AIB
  MOD_RES (16)..(16): Xaa is AIB
  MOD_RES (29)..(29): C-terminal amidation
HXEGTFTSDKSKYLDXRAAQDFVQWLMDT

SEQ ID NO: 1706 - protein, 29 aa, Artificial Sequence
  Synthetic peptide
  MOD_RES (2)..(2): Xaa is AIB
  MOD_RES (10)..(10): Acylated with C16 fatty acyl group via dipeptide spacer
  MOD_RES (16)..(16): Xaa is AIB
HXQGTFISDKSKYLDXRAAQDFVQWLMDT

SEQ ID NO: 1707 - protein, 29 aa, Artificial Sequence
  Synthetic peptide
  MOD_RES (2)..(2): Xaa is AIB
  MOD_RES (10)..(10): Acylated with C16 fatty acyl group via dipeptide spacer
  MOD_RES (29)..(29): C-terminal amidation
HXQGTFTSDKSKYLDERAAQDFVQWLMDT

SEQ ID NO: 1708 - protein, 29 aa, Artificial Sequence
  Synthetic peptide
  MOD_RES (2)..(2): Xaa is AIB
  MOD_RES (10)..(10): Acylated with C16 fatty acyl group via dipeptide spacer
  MOD_RES (16)..(16): Xaa is AIB
  MOD_RES (29)..(29): C-terminal amidation
HXQGTFTSDKSKYLEXRAAQDFVQWLMDT

SEQ ID NO: 1709 - protein, 29 aa, Artificial Sequence
  Synthetic peptide
  MOD_RES (2)..(2): d-Ser
  MOD_RES (10)..(10): Acylated with C16 fatty acyl group via dipeptide spacer
  MOD_RES (16)..(16): Xaa is AIB
  MOD_RES (29)..(29): C-terminal amidation
HSQGTFTSDKSKYLDXRAAQDFVQWLMDT

SEQ ID NO: 1710 - protein, 29 aa, Artificial Sequence
  Synthetic peptide
  MOD_RES (2)..(2): Xaa is AIB
  MOD_RES (10)..(10): Acylated with C16 fatty acyl group via dipeptide spacer
  MOD_RES (16)..(16): Xaa is AIB
  MOD_RES (29)..(29): C-terminal amidation
HXQGTFTSDKSKYLDXRAAQDFVQWLLDT

SEQ ID NO: 1711 - protein, 29 aa, Artificial Sequence
  Synthetic peptide
  MOD_RES (2)..(2): Xaa is AIB
  MOD_RES (10)..(10): Acylated with C16 fatty acyl group via dipeptide spacer
  MOD_RES (29)..(29): C-terminal amidation
HXQGTFTSDKSKYLDEQAAKEFIAWLLDT

SEQ ID NO: 1712 - protein, 29 aa, Artificial Sequence
  Synthetic peptide
  MOD_RES (2)..(2): Xaa is AIB
  MOD_RES (10)..(10): Acylated with C16 fatty acyl group via gamma-Glu spacer
  MOD_RES (29)..(29): C-terminal amidation
HXQGTFTSDKSKYLDEQAAKEFICWLLDT

SEQ ID NO: 1713 - protein, 29 aa, Artificial Sequence
  Synthetic peptide
  MOD_RES (2)..(2): Xaa is AIB
  MOD_RES (10)..(10): Acylated with C16 fatty acyl group via gamma-Glu spacer
  MOD_RES (24)..(24): PEGYLATION
  MOD_RES (29)..(29): C-terminal amidation
HXQGTFTSDKSKYLDEQAAKEFICWLLDT

SEQ ID NO: 1714 - protein, 29 aa, Artificial Sequence
  Synthetic peptide
  MOD_RES (2)..(2): Xaa is AIB
  MOD_RES (10)..(10): Acylated with C16 fatty acyl group via gamma-Glu spacer
  MOD_RES (24)..(24): PEGYLATION
  MOD_RES (29)..(29): C-terminal amidation
HXQGTFTSDKSKYLDERAAQDFVCWLLDT

SEQ ID NO: 1715 - protein, 30 aa, Artificial Sequence
  Synthetic peptide
  MOD_RES (2)..(2): Xaa is AIB
  MOD_RES (10)..(10): Acylated with C16 fatty acyl group via gamma-Glu spacer
  MOD_RES (30)..(30): PEGYLATION
  MOD_RES (30)..(30): C-terminal amidation
HXQGTFTSDKSKYLDEQAAKEFIQWLLDTC

SEQ ID NO: 1716 - protein, 29 aa, Artificial Sequence
  Synthetic peptide
  MOD_RES (10)..(10): Acylated with C16 fatty acyl group via gamma-Glu spacer
  MOD_RES (24)..(24): PEGYLATION
  MOD_RES (29)..(29): C-terminal amidation
HAQGTFTSDKSKYLDERAAQDFVCWLLDT

SEQ ID NO: 1717 - protein, 29 aa, Artificial Sequence
  Synthetic peptide
  MOD_RES (2)..(2): d-Ser
  MOD_RES (10)..(10): Acylated with C16 fatty acyl group via gamma-Glu spacer
  MOD_RES (29)..(29): C-terminal amidation
HSQGTFTSDKSKYLDEQAAKEFICWLLDT

SEQ ID NO: 1718 - protein, 29 aa, Artificial Sequence
  Synthetic peptide
  MOD_RES (2)..(2): d-Ser
  MOD_RES (10)..(10): Acylated with C16 fatty acyl group via gamma-Glu spacer
  MOD_RES (29)..(29): C-terminal amidation
HSQGTFTSDKSKYLDERAAQDFVQWLLDT

SEQ ID NO: 1719 - protein, 29 aa, Artificial Sequence
  Synthetic peptide
  MOD_RES (2)..(2): d-Ser
  MOD_RES (10)..(10): Acylated with C16 fatty acyl group via gamma-Glu spacer
  MOD_RES (29)..(29): C-terminal amidation
HSQGTFTSDKSKYLDERAAQDFVCWLLDT

SEQ ID NO: 1720 - protein, 29 aa, Artificial Sequence
  Synthetic peptide
  MOD_RES (2)..(2): d-Ser
  MOD_RES (10)..(10): Acylated with C16 fatty acyl group via gamma-Glu spacer
HSQGTFTSDKSKYLDEQAAKEFICWLLDT

SEQ ID NO: 1721 - protein, 31 aa, Artificial Sequence
  Synthetic peptide
  MOD_RES (2)..(2): d-Ser
  MOD_RES (10)..(10): Acylated with C16 fatty acyl group via gamma-Glu spacer
  MOD_RES (31)..(31): C-terminal amidation
HSQGTFTSDKSKYLDEQAAKEFICWLLDTGE

SEQ ID NO: 1722 - protein, 31 aa, Artificial Sequence
  Synthetic peptide
  MOD_RES (2)..(2): d-Ser
  MOD_RES (10)..(10): Acylated with C16 fatty acyl group via gamma-Glu spacer
  MOD_RES (24)..(24): PEGYLATION
HSQGTFTSDKSKYLDEQAAKEFICWLLDTGG

SEQ ID NO: 1723 - protein, 29 aa, Artificial Sequence
  Synthetic peptide
  MOD_RES (2)..(2): d-Ser
  MOD_RES (10)..(10): Acylated with C16 fatty acyl group via gamma-Glu spacer
  MOD_RES (24)..(24): PEGYLATION
  MOD_RES (29)..(29): C-terminal amidation
HSQGTFTSDKSKYLDERAAQDFVCWLLDT

SEQ ID NO: 1724 - protein, 30 aa, Artificial Sequence
  Synthetic peptide
  MOD_RES (2)..(2): d-Ser
  MOD_RES (10)..(10): Acylated with C16 fatty acyl group via gamma-Glu spacer
  MOD_RES (30)..(30): PEGYLATION
  MOD_RES (30)..(30): C-terminal amidation
HSQGTFTSDKSKYLDERAAQDFVQWLLDTC

SEQ ID NO: 1725 - protein, 30 aa, Artificial Sequence
  Synthetic peptide
  MOD_RES (2)..(2): d-Ser
  MOD_RES (10)..(10): Acylated with C16 fatty acyl group via gamma-Glu spacer
  MOD_RES (24)..(24): PEGYLATION
  MOD_RES (30)..(30): C-terminal amidation
HSQGTFTSDYSKYLDSRRAQDFVQWLMNTE

SEQ ID NO: 1726 - protein, 30 aa, Artificial Sequence
  Synthetic peptide
  MOD_RES (2)..(2): d-Ser
  MOD_RES (10)..(10): Acylated with C16 fatty acyl group via gamma-Glu spacer
  MOD_RES (24)..(24): PEGYLATION
HSQGTFTSDKSKYLDEQAAKEFICWLLDTC

SEQ ID NO: 1727 - protein, 29 aa, Artificial Sequence
  Synthetic peptide
  MOD_RES (1)..(1): Xaa is DMIA
  MOD_RES (10)..(10): Acylated with C16 fatty acyl group via gamma-Glu spacer
  MOD_RES (29)..(29): C-terminal amidation
XSQGTFTSDKSKYLDEQAAKEFICWLLDT

SEQ ID NO: 1728 - protein, 29 aa, Artificial Sequence
  Synthetic peptide
  MOD_RES (1)..(1): des-amino-His
  MOD_RES (10)..(10): Acylated with C16 fatty acyl group via gamma-Glu spacer
  MOD_RES (29)..(29): C-terminal amidation
HSQGTFTSDKSKYLDEQAAKEFICWLLDT

SEQ ID NO: 1729 - protein, 29 aa, Artificial Sequence
  Synthetic peptide
  MOD_RES (1)..(1): Ac-His
  MOD_RES (10)..(10): Acylated with C16 fatty acyl group via gamma-Glu spacer
  MOD_RES (24)..(24): PEGYLATION
  MOD_RES (29)..(29): C-terminal amidation
HSQGTFTSDKSKYLDEQAAKEFICWLLDT

SEQ ID NO: 1730 - protein, 29 aa, Artificial Sequence
  Synthetic peptide
  MOD_RES (2)..(2): Xaa is AIB
  MOD_RES (10)..(10): Acylated with C16 fatty acyl group via gamma-Glu spacer
  MOD_RES (29)..(29): C-terminal amidation
HXQGTFTSDKSKYLDEEAVRLFIEWLMNT

SEQ ID NO: 1731 - protein, 29 aa, Artificial Sequence
  Synthetic peptide
  MOD_RES (2)..(2): Xaa is AIB
  MOD_RES (10)..(10): Acylated with C16 fatty acyl group
  MOD_RES (29)..(29): C-terminal amidation
HXQGTFTSDKSKYLDEEAVRLFIEWLMNT

SEQ ID NO: 1732 - protein, 29 aa, Artificial Sequence
  Synthetic peptide
  MOD_RES (2)..(2): Xaa is AIB
  MOD_RES (24)..(24): PEGYLATION
  MOD_RES (29)..(29): C-terminal amidation
HXQGTFTSDYSKYLDEEAVRLFICWLMNT

SEQ ID NO: 1733 - protein, 29 aa, Artificial Sequence
  Synthetic peptide
  MOD_RES (2)..(2): Xaa is AIB
  MOD_RES (29)..(29): C-terminal amidation
HXQGTFTSDYSKYLDEEAVRLFIEWLMNT

SEQ ID NO: 1734 - protein, 29 aa, Artificial Sequence
  Synthetic peptide
  MOD_RES (2)..(2): Xaa is AIB
  MOD_RES (29)..(29): C-terminal amidation
HXQGTFTSDYSKYLDEEAVRLFICWLMNT

SEQ ID NO: 1735 - protein, 29 aa, Artificial Sequence
  Synthetic peptide
  MOD_RES (2)..(2): d-Ser
  MOD_RES (24)..(24): PEGYLATION
  MOD_RES (29)..(29): C-terminal amidation
HSQGTFTSDYSKYLDEEAVRLFICWLMNT

SEQ ID NO: 1736 - protein, 29 aa, Artificial Sequence
  Synthetic peptide
  MOD_RES (2)..(2): d-Ser
  MOD_RES (29)..(29): C-terminal amidation
HSQGTFTSDYSKYLDEEAVRLFIEWLMNT

SEQ ID NO: 1737 - protein, 29 aa, Artificial Sequence
  Synthetic peptide
  MOD_RES (2)..(2): d-Ser
  MOD_RES (29)..(29): C-terminal amidation
HSQGTFTSDYSKYLDEEAVRLFICWLMNT

SEQ ID NO: 1738 - protein, 29 aa, Artificial Sequence
  Synthetic peptide
  MOD_RES (10)..(10): Acylated with C16 fatty acyl group via acidic amino acid spacer
  MOD_RES (29)..(29): C-terminal amidation
HSQGTFTSDKSKYLDEEAVRLFIEWLMNT

SEQ ID NO: 1739 - protein, 29 aa, Artificial Sequence
  Synthetic peptide
  MOD_RES (10)..(10): Acylated with C16 fatty acyl group via gamma-Glu spacer
  MOD_RES (29)..(29): C-terminal amidation
HSQGTFTSDKSKYLDEEAVRLFIEWLMNT

SEQ ID NO: 1740 - protein, 29 aa, Artificial Sequence
  Synthetic peptide
  MOD_RES (2)..(2): Xaa is AIB
  MISC_FEATURE (16)..(20): Salt bridge
  MISC_FEATURE (17)..(21): Salt bridge
  MOD_RES (24)..(24): PEGYLATION
  MOD_RES (29)..(29): C-terminal amidation
HXQGTFTSDYSKYLDEKRAKEFVCWLMNT

SEQ ID NO: 1741 - protein, 29 aa, Artificial Sequence
  Synthetic peptide
  MOD_RES (2)..(2): Xaa is AIB
  MOD_RES (16)..(16): Xaa is AIB
  MISC_FEATURE (16)..(20): Salt bridge
  MISC_FEATURE (17)..(21): Salt bridge
  MOD_RES (24)..(24): PEGYLATION
  MOD_RES (29)..(29): C-terminal amidation
HXQGTFTSDYSKYLDXKRAKEFVCWLMNT

SEQ ID NO: 1742 - protein, 29 aa, Artificial Sequence
  Synthetic peptide
  MOD_RES (2)..(2): d-Ser
  MISC_FEATURE (16)..(20): Salt bridge
  MISC_FEATURE (17)..(21): Salt bridge
  MOD_RES (24)..(24): PEGYLATION
  MOD_RES (29)..(29): C-terminal amidation
HSQGTFTSDYSKYLDEKRAKEFVCWLMNT

SEQ ID NO: 1743 - protein, 29 aa, Artificial Sequence
  Synthetic peptide
  MOD_RES (2)..(2): d-Ser
  MOD_RES (16)..(16): Xaa is AIB
  MISC_FEATURE (16)..(20): Salt bridge
  MISC_FEATURE (17)..(21): Salt bridge
  MOD_RES (24)..(24): PEGYLATION
  MOD_RES (29)..(29): C-terminal amidation
HSQGTFTSDYSKYLDXKRAKEFVCWLMNT

SEQ ID NO: 1744 - protein, 29 aa, Artificial Sequence
  Synthetic peptide
  MOD_RES (2)..(2): d-Ser
  MISC_FEATURE (16)..(20): Salt bridge
  MISC_FEATURE (17)..(21): Salt bridge
  MOD_RES (29)..(29): C-terminal amidation
HSQGTFTSDYSKYLDEKRAKEFVQWLMNT

SEQ ID NO: 1745 - protein, 29 aa, Artificial Sequence
  Synthetic peptide
  MOD_RES (2)..(2): D-serine, D-alanine, valine, amino n-butyric acid, glycine, N-methyl serine, aminoisobutyric acid
  MOD_RES (16)..(16): Xaa is AIB
  MISC_FEATURE (16)..(20): Salt bridge
  MISC_FEATURE (17)..(21): Salt bridge
  MOD_RES (29)..(29): C-terminal amidation
HSQGTFTSDYSKYLDXKRAKEFVQWLMNT

SEQ ID NO: 1746 - protein, 29 aa, Artificial Sequence
  Synthetic peptide
  MOD_RES (2)..(2): D-serine, D-alanine, valine, amino n-butyric acid, glycine, N-methyl serine, aminoisobutyric acid
  MOD_RES (10)..(10): Acylated with C16 fatty acyl group via gamma-Glu spacer
  MISC_FEATURE (15)..(20): Salt bridge
  MOD_RES (16)..(16): Xaa is AIB
  MISC_FEATURE (16)..(21): Salt bridge
  MOD_RES (29)..(29): C-terminal amidation
HSQGTFTSDKSKYLDXKRAKEFVQWLMNT

SEQ ID NO: 1747 - protein, 29 aa, Artificial Sequence
  Synthetic peptide
  MOD_RES (1)..(1): Xaa is DMIA
  MOD_RES (16)..(16): Xaa is AIB
  MISC_FEATURE (16)..(20): Salt bridge
  MISC_FEATURE (17)..(21): Salt bridge
  MOD_RES (24)..(24): PEGYLATION
  MOD_RES (29)..(29): C-terminal amidation
XSQGTFTSDYSKYLDXKRAKEFVCWLMNT

SEQ ID NO: 1748 - protein, 29 aa, Artificial Sequence
  Synthetic peptide
  MISC_FEATURE (16)..(20): Salt bridge
  MISC_FEATURE (17)..(21): Salt bridge
  MOD_RES (29)..(29): C-terminal amidation
HSQGTFTSDYSKYLDEKRAKEFVQWLMNT

SEQ ID NO: 1749 - protein, 29 aa, Artificial Sequence
  Synthetic peptide
  MOD_RES (2)..(2): D-serine, D-alanine, valine, amino n-butyric acid, glycine, N-methyl serine, aminoisobutyric acid
  MOD_RES (10)..(10): Acylated with C16 fatty acyl group via dipeptide spacer
  MOD_RES (16)..(16): Xaa is AIB
  MOD_RES (29)..(29): C-terminal amidation
HXQGTFTSDKSKYLDXRAAQDFVQWLMDT

SEQ ID NO: 1750 - protein, 29 aa, Artificial Sequence
  Synthetic peptide
  MOD_RES (2)..(2): Xaa is AIB
  MOD_RES (10)..(10): Acylated with C16 fatty acyl group via acidic amino acid spacer
  MOD_RES (29)..(29): C-terminal amidation
HXQGTFTSDKSKYLDEQAAKEFICWLLDT

SEQ ID NO: 1751 - protein, 29 aa, Artificial Sequence
  Synthetic peptide
  MOD_RES (2)..(2): Xaa is AIB
  MOD_RES (10)..(10): Acylated with C16 fatty acyl group via acidic amino acid spacer
  MOD_RES (24)..(24): PEGYLATION
  MOD_RES (29)..(29): C-terminal amidation
HXQGTFTSDKSKYLDEQAAKEFICWLLDT

SEQ ID NO: 1752 - protein, 29 aa, Artificial Sequence
  Synthetic peptide
  MOD_RES (2)..(2): Xaa is AIB
  MOD_RES (10)..(10): Acylated with C16 fatty acyl group via acidic amino acid spacer
  MOD_RES (24)..(24): PEGYLATION
  MOD_RES (29)..(29): C-terminal amidation
HXQGTFTSDKSKYLDERAAQDFVCWLLDT

SEQ ID NO: 1753 - protein, 30 aa, Artificial Sequence; identical to SEQ ID NO: 1715
  Synthetic peptide
  MOD_RES (2)..(2): Xaa is AIB
  MOD_RES (10)..(10): Acylated with C16 fatty acyl group via acidic amino acid spacer
  MOD_RES (30)..(30): PEGYLATION
  MOD_RES (30)..(30): C-terminal amidation

SEQ ID NO: 1754 - protein, 29 aa, Artificial Sequence
  Synthetic peptide
  MOD_RES (10)..(10): Acylated with C16 fatty acyl group via acidic amino acid spacer
  MOD_RES (24)..(24): PEGYLATION
  MOD_RES (29)..(29): C-terminal amidation
HAQGTFTSDKSKYLDERAAQDFVCWLLDT

SEQ ID NO: 1755 - protein, 29 aa, Artificial Sequence
  Synthetic peptide
  MOD_RES (2)..(2): D-serine, D-alanine, valine, amino n-butyric acid, glycine, N-methyl serine, aminoisobutyric acid
  MOD_RES (10)..(10): Acylated with C16 fatty acyl group via acidic amino acid spacer
  MOD_RES (29)..(29): C-terminal amidation
HXQGTFTSDKSKYLDEQAAKEFICWLLDT

SEQ ID NO: 1756 - protein, 29 aa, Artificial Sequence
  Synthetic peptide
  MOD_RES (2)..(2): D-serine, D-alanine, valine, amino n-butyric acid, glycine, N-methyl serine, aminoisobutyric acid
  MOD_RES (10)..(10): Acylated with C16 fatty acyl group via acidic amino acid spacer
  MOD_RES (29)..(29): C-terminal amidation
HXQGTFTSDKSKYLDERAAQDFVQWLLDT

SEQ ID NO: 1757 - protein, 29 aa, Artificial Sequence
  Synthetic peptide
  MOD_RES (2)..(2): D-serine, D-alanine, valine, amino n-butyric acid, glycine, N-methyl serine, aminoisobutyric acid
  MOD_RES (10)..(10): Acylated with C16 fatty acyl group via acidic amino acid spacer
  MOD_RES (29)..(29): C-terminal amidation
HXQGTFTSDKSKYLDERAAQDFVCWLLDT

SEQ ID NO: 1758 - protein, 29 aa, Artificial Sequence
  Synthetic peptide
  MOD_RES (2)..(2): D-serine, D-alanine, valine, amino n-butyric acid, glycine, N-methyl serine, aminoisobutyric acid
  MOD_RES (10)..(10): Acylated with C16 fatty acyl group via acidic amino acid spacer
HXQGTFTSDKSKYLDEQAAKEFICWLLDT

SEQ ID NO: 1759 - protein, 31 aa, Artificial Sequence
  Synthetic peptide
  MOD_RES (2)..(2): D-serine, D-alanine, valine, amino n-butyric acid, glycine, N-methyl serine, aminoisobutyric acid
  MOD_RES (10)..(10): Acylated with C16 fatty acyl group via acidic amino acid spacer
  MOD_RES (31)..(31): C-terminal amidation
HXQGTFTSDKSKYLDEQAAKEFICWLLDTGE

SEQ ID NO: 1760 - protein, 31 aa, Artificial Sequence
  Synthetic peptide
  MOD_RES (2)..(2): D-serine, D-alanine, valine, amino n-butyric acid, glycine, N-methyl serine, aminoisobutyric acid
  MOD_RES (10)..(10): Acylated with C16 fatty acyl group via acidic amino acid spacer
  MOD_RES (24)..(24): PEGYLATION
HXQGTFTSDKSKYLDEQAAKEFICWLLDTGG

SEQ ID NO: 1761 - protein, 29 aa, Artificial Sequence
  Synthetic peptide
  MOD_RES (2)..(2): D-serine, D-alanine, valine, amino n-butyric acid, glycine, N-methyl serine, aminoisobutyric acid
  MOD_RES (10)..(10): Acylated with C16 fatty acyl group via acidic amino acid spacer
  MOD_RES (24)..(24): PEGYLATION
  MOD_RES (29)..(29): C-terminal amidation
HXQGTFTSDKSKYLDERAAQDFVCWLLDT

SEQ ID NO: 1762 - protein, 30 aa, Artificial Sequence
  Synthetic peptide
  MOD_RES (2)..(2): D-serine, D-alanine, valine, amino n-butyric acid, glycine, N-methyl serine, aminoisobutyric acid
  MOD_RES (10)..(10): Acylated with C16 fatty acyl group via acidic amino acid spacer
  MOD_RES (30)..(30): PEGYLATION
  MOD_RES (30)..(30): C-terminal amidation
HXQGTFTSDKSKYLDERAAQDFVQWLLDTC

SEQ ID NO: 1763 - protein, 30 aa, Artificial Sequence
  Synthetic peptide
  MOD_RES (2)..(2): D-serine, D-alanine, valine, amino n-butyric acid, glycine, N-methyl serine, aminoisobutyric acid
  MOD_RES (10)..(10): Acylated with C16 fatty acyl group via acidic amino acid spacer
  MOD_RES (24)..(24): PEGYLATION
  MOD_RES (30)..(30): C-terminal amidation
HXQGTFTSDYSKYLDSRRAQDFVQWLMNTE

SEQ ID NO: 1764 - protein, 30 aa, Artificial Sequence
  Synthetic peptide
  MOD_RES (2)..(2): D-serine, D-alanine, valine, amino n-butyric acid, glycine, N-methyl serine, aminoisobutyric acid
  MOD_RES (10)..(10): Acylated with C16 fatty acyl group via acidic amino acid spacer
  MOD_RES (24)..(24): PEGYLATION
HXQGTFTSDKSKYLDEQAAKEFICWLLDTC

SEQ ID NO: 1765 - protein, 29 aa, Artificial Sequence
  Synthetic peptide
  MOD_RES (1)..(1): Xaa is DMIA
  MOD_RES (10)..(10): Acylated with C16 fatty acyl group via acidic amino acid spacer
  MOD_RES (29)..(29): C-terminal amidation
XSQGTFTSDKSKYLDEQAAKEFICWLLDT

SEQ ID NO: 1766 - protein, 29 aa, Artificial Sequence
  Synthetic peptide
  MOD_RES (1)..(1): des-amino-His
  MOD_RES (10)..(10): Acylated with C16 fatty acyl group via acidic amino acid spacer
  MOD_RES (29)..(29): C-terminal amidation
HSQGTFTSDKSKYLDEQAAKEFICWLLDT

SEQ ID NO: 1767 - protein, 29 aa, Artificial Sequence
  Synthetic peptide
  MOD_RES (1)..(1): Ac-His
  MOD_RES (10)..(10): Acylated with C16 fatty acyl group via acidic amino acid spacer
  MOD_RES (24)..(24): PEGYLATION
  MOD_RES (29)..(29): C-terminal amidation
HSQGTFTSDKSKYLDEQAAKEFICWLLDT

SEQ ID NO: 1768 - protein, 29 aa, Artificial Sequence
  Synthetic peptide
  MOD_RES (2)..(2): Xaa is AIB
  MOD_RES (10)..(10): Acylated with C16 fatty acyl group via acidic amino acid spacer
  MOD_RES (29)..(29): C-terminal amidation
HXQGTFTSDKSKYLDEEAVRLFIEWLMNT

SEQ ID NO: 1769 - protein, 29 aa, Artificial Sequence
  Synthetic peptide
  MOD_RES (2)..(2): D-serine, D-alanine, valine, amino n-butyric acid, glycine, N-methyl serine, aminoisobutyric acid
  MOD_RES (24)..(24): PEGYLATION
  MOD_RES (29)..(29): C-terminal amidation
HXQGTFTSDYSKYLDEEAVRLFICWLMNT

SEQ ID NO: 1770 - protein, 29 aa, Artificial Sequence
  Synthetic peptide
  MOD_RES (2)..(2): D-serine, D-alanine, valine, amino n-butyric acid, glycine, N-methyl serine, aminoisobutyric acid
  MOD_RES (29)..(29): C-terminal amidation
HXQGTFTSDYSKYLDEEAVRLFIEWLMNT

SEQ ID NO: 1771 - protein, 29 aa, Artificial Sequence
  Synthetic peptide
  MOD_RES (2)..(2): D-serine, D-alanine, valine, amino n-butyric acid, glycine, N-methyl serine, aminoisobutyric acid
  MOD_RES (29)..(29): C-terminal amidation
HXQGTFTSDYSKYLDEEAVRLFICWLMNT

SEQ ID NO: 1772 - protein, 29 aa, Artificial Sequence
  Synthetic peptide
  MOD_RES (10)..(10): Acylated with C16 fatty acyl group via acidic amino acid spacer
  MOD_RES (29)..(29): C-terminal amidation
HSQGTFTSDKSKYLDEEAVRLFIEWLMNT

SEQ ID NO: 1773 - protein, 29 aa, Artificial Sequence
  Synthetic peptide
  MOD_RES (2)..(2): D-serine, D-alanine, valine, amino n-butyric acid, glycine, N-methyl serine, aminoisobutyric acid
  MISC_FEATURE (16)..(20): Salt bridge
  MISC_FEATURE (17)..(21): Salt bridge
  MOD_RES (24)..(24): PEGYLATION
  MOD_RES (29)..(29): C-terminal amidation
HXQGTFTSDYSKYLDEKRAKEFVCWLMNT

SEQ ID NO: 1774 - protein, 29 aa, Artificial Sequence
  Synthetic peptide
  MOD_RES (2)..(2): D-serine, D-alanine, valine, amino n-butyric acid, glycine, N-methyl serine, aminoisobutyric acid
  MOD_RES (16)..(16): Xaa is AIB
  MISC_FEATURE (16)..(20): Salt bridge
  MISC_FEATURE (17)..(21): Salt bridge
  MOD_RES (24)..(24): PEGYLATION
  MOD_RES (29)..(29): C-terminal amidation
HSQGTFTSDYSKYLDXKRAKEFVCWLMNT

SEQ ID NO: 1775 - protein, 29 aa, Artificial Sequence
  Synthetic peptide
  MOD_RES (2)..(2): D-serine, D-alanine, valine, amino n-butyric acid, glycine, N-methyl serine, aminoisobutyric acid
  MISC_FEATURE (16)..(20): Salt bridge
  MISC_FEATURE (17)..(21): Salt bridge
  MOD_RES (29)..(29): C-terminal amidation
HSQGTFTSDYSKYLDEKRAKEFVQWLMNT

SEQ ID NO: 1776 - protein, 29 aa, Artificial Sequence
  Synthetic peptide
  MOD_RES (2)..(2): D-serine, D-alanine, valine, amino n-butyric acid, glycine, N-methyl serine, aminoisobutyric acid
  MOD_RES (10)..(10): Acylated with C16 fatty acyl group via acidic amino acid spacer
  MISC_FEATURE (15)..(20): Salt bridge
  MOD_RES (16)..(16): Xaa is AIB
  MISC_FEATURE (16)..(21): Salt bridge
  MOD_RES (29)..(29): C-terminal amidation
HSQGTFTSDKSKYLDXKRAKEFVQWLMNT

SEQ ID NO: 1777-1800 - skipped (24 entries)

SEQ ID NO: 1801 - protein, 37 aa, Homo sapiens
HSQGTFTSDYSKYLDSRRAQDFVQWLMNTKRNRNNIA

SEQ ID NO: 1802 - protein, 37 aa, Artificial Sequence
  OXM analog
HSEGTFTSDYSKYLDSRRAQDFVQWLMNTKRNRNNIA

SEQ ID NO: 1803 - protein, 37 aa, Artificial Sequence
  OXM analog
HSDGTFTSDYSKYLDSRRAQDFVQWLMNTKRNRNNIA

SEQ ID NO: 1804 - protein, 38 aa, Artificial Sequence
  OXM analog
  MOD_RES (2)..(2): Xaa=Aminoisobutyric acid
  MOD_RES (38)..(38): C-terminal amidation
HXQGTFTSDYSKYLDSRRAQDFVQWLMNTKRNRNNIAC

SEQ ID NO: 1805 - protein, 38 aa, Artificial Sequence
  OXM analog
  MOD_RES (2)..(2): Xaa=D-serine
  MOD_RES (38)..(38): Xaa=Cys(mPEG)5kDa
  MOD_RES (38)..(38): C-terminal amidation
HXQGTFTSDYSKYLDSRRAQDFVQWLMNTKRNRNNIAX

SEQ ID NO: 1806 - protein, 38 aa, Artificial Sequence; identical to SEQ ID NO: 1805
  OXM analog
  MOD_RES (2)..(2): Xaa=D-serine
  MOD_RES (38)..(38): Xaa=Cys(mPEG)20kDa
  MOD_RES (38)..(38): C-terminal amidation

SEQ ID NO: 1807 - protein, 38 aa, Artificial Sequence; identical to SEQ ID NO: 1805
  OXM analog
  MOD_RES (2)..(2): Xaa=D-serine
  MOD_RES (38)..(38): Xaa=Cys(mPEG)2 40kDa
  MOD_RES (38)..(38): C-terminal amidation

SEQ ID NO: 1808 - protein, 38 aa, Artificial Sequence; identical to SEQ ID NO: 1805
  OXM analog
  MOD_RES (2)..(2): Xaa=D-serine
  MOD_RES (38)..(38): Xaa=Cys(9cholest-5-en-3-yl{[(2R)-3-amino-2-(amino) -3-oxopropyl]thio}acetate)
  MOD_RES (38)..(38): C-terminal amidation

SEQ ID NO: 1809 - protein, 38 aa, Artificial Sequence; identical to SEQ ID NO: 1805
  OXM analog
  MOD_RES (2)..(2): Xaa=Aminoisobutyric acid
  MOD_RES (38)..(38): Xaa=Cys(mPEG)5kDa
  MOD_RES (38)..(38): C-terminal amidation

SEQ ID NO: 1810 - protein, 38 aa, Artificial Sequence; identical to SEQ ID NO: 1805
  OXM analog
  MOD_RES (2)..(2): Xaa=aminoisobutyric acid
  MOD_RES (38)..(38): Xaa=Cys(mPEG)20kDa
  MOD_RES (38)..(38): C-terminal amidation

SEQ ID NO: 1811 - protein, 38 aa, Artificial Sequence; identical to SEQ ID NO: 1805
  OXM analog
  MOD_RES (2)..(2): X=aminoisobutyric acid
  MOD_RES (38)..(38): Xaa=Cys(mPEG)2 40kDa
  MOD_RES (38)..(38): C-terminal amidation

SEQ ID NO: 1812 - protein, 38 aa, Artificial Sequence; identical to SEQ ID NO: 1805
  OXM analog
  MOD_RES (2)..(2): Xaa=aminoisobutyric acid
  MOD_RES (38)..(38): Xaa=Cys(cholest-5-en-3-yl{[(2R)-3-amino-2-(amino)- 3-oxopropyl]thio}acetate)
  MOD_RES (38)..(38): C-terminal amidation

SEQ ID NO: 1813 - protein, 38 aa, Artificial Sequence
  OXM analog
  MOD_RES (2)..(2): Xaa=aminoisobutyric acid
  MOD_RES (27)..(27): Xaa=methionine sulfoxide
  MOD_RES (38)..(38): Xaa=Cys(mPEG)240kDa
  MOD_RES (38)..(38): C-terminal amidation
HXQGTFTSDYSKYLDSRRAQDFVQWLXNTKRNRNNIAX

SEQ ID NO: 1814 - protein, 38 aa, Artificial Sequence; identical to SEQ ID NO: 1813
  OXM analog
  MOD_RES (2)..(2): Xaa=Aib
  MOD_RES (27)..(27): Xaa=methionine sulfoxide
  MOD_RES (38)..(38): Xaa=Cys(mPEG)260kDa
  MOD_RES (38)..(38): C-terminal amidation

SEQ ID NO: 1815 - protein, 37 aa, Artificial Sequence
  OXM analog
  MOD_RES (2)..(2): Xaa=Aib
  MOD_RES (20)..(20): Xaa=Cys(mPEG)240kDa
  MOD_RES (37)..(37): C-terminal amidation
HXQGTFTSDYSKYLDSRRAXDFVQWLMNTKRNRNNIA

SEQ ID NO: 1816 - protein, 37 aa, Artificial Sequence
  OXM analog
  MOD_RES (2)..(2): Xaa=Aib
  MOD_RES (21)..(21): Xaa=Cys(mPEG)240kDa
  MOD_RES (37)..(37): C-terminal amidation
HXQGTFTSDYSKYLDSRRAQXFVQWLMNTKRNRNNIA

SEQ ID NO: 1817 - protein, 37 aa, Artificial Sequence
  OXM analog
  MOD_RES (2)..(2): Aib
  MOD_RES (24)..(24): Xaa=Cys(mPEG)240kDa
  MOD_RES (27)..(27): Xaa=metionine sulfoxide
  MOD_RES (37)..(37): C-terminal amidation
HXQGTFTSDYSKYLDSRRAQDFVXWLXNTKRNRNNIA

SEQ ID NO: 1818 - protein, 37 aa, Artificial Sequence
  OXM analog
  MOD_RES (2)..(2): Xaa=Aib
  MOD_RES (28)..(28): Xaa=Cys(mPEG)240kDa
  MOD_RES (37)..(37): C-terminal amidation
HXQGTFTSDYSKYLDSRRAQDFVQWLMXTKRNRNNIA

SEQ ID NO: 1819 - protein, 38 aa, Artificial Sequence; identical to SEQ ID NO: 1805
  OXM analog
  MOD_RES (2)..(2): Xaa=D-serine
  MOD_RES (38)..(38): Xaa=Lys(palmitoyl)
  MOD_RES (38)..(38): C-terminal amidation

SEQ ID NO: 1820 - protein, 38 aa, Artificial Sequence
  OXM analog
  MOD_RES (1)..(1): Xaa=desamino-His (deltaNH2-H)
  MOD_RES (2)..(2): Xaa=Aib
  MOD_RES (27)..(27): Xaa=mrtionine sulfoxide
  MOD_RES (38)..(38): Xaa=Cys(mPEG)240kDa
  MOD_RES (38)..(38): C-terminal amidation
XXQGTFTSDYSKYLDSRRAQDFVQWLXNTKRNRNNIAX

SEQ ID NO: 1821 - protein, 38 aa, Artificial Sequence; identical to SEQ ID NO: 1805
  OXM analog
  MOD_RES (2)..(2): xaa=D-serine
  MOD_RES (38)..(38): Xaa=Cys(cholest-5-en-3-yl 1-{[(2R)-3-amino-2-(amino)-3-oxopropyl]thio}-2-oxo -6,9,12,15-tetraoxa-3-azaoctadecan-18-oate]) or Cys(Oxa4-cholesterol))
  MOD_RES (38)..(38): C-terminal amidation

SEQ ID NO: 1822 - protein, 37 aa, Artificial Sequence
  OXM analog
  MOD_RES (2)..(2): Xaa=Aib
  MOD_RES (11)..(11): Xaa=Cys(mPEG)240kDa
  MOD_RES (27)..(27): Xaa=methionine sulfoxide
  MOD_RES (37)..(37): C-terminal amidation
HXQGTFTSDYXKYLDSRRAQDFVQWLXNTKRNRNNIA

SEQ ID NO: 1823 - protein, 37 aa, Artificial Sequence
  OXM analog
  MOD_RES (2)..(2): Xaa=Aib
  MOD_RES (12)..(12): Xaa=Cys(mPEG)240kDa
  MOD_RES (27)..(27): Xaa=Methionine sulfoxide
  MOD_RES (37)..(37): C-terminal amidation
HXQGTFTSDYSXYLDSRRAQDFVQWLXNTKRNRNNIA

SEQ ID NO: 1824 - protein, 38 aa, Artificial Sequence; identical to SEQ ID NO: 1805
  OXM analog
  MOD_RES (2)..(2): Xaa=Aib
  MOD_RES (38)..(38): Xaa=Lys(palmitoyl)
  MOD_RES (38)..(38): C-terminal amidation

SEQ ID NO: 1825 - protein, 38 aa, Artificial Sequence
  OXM analog
  MOD_RES (2)..(2): Xaa=Aib
  MOD_RES (27)..(27): Xaa=Nle
  MOD_RES (38)..(38): C-terminal amidation
HXQGTFTSDYSKYLDSRRAQDFVQWLXNTKRNRNNIAC

SEQ ID NO: 1826 - protein, 38 aa, Artificial Sequence; identical to SEQ ID NO: 1825
  OXM analog
  MOD_RES (2)..(2): Xaa=Aib
  MOD_RES (27)..(27): Xaa=O-methyl-L-homoserine
  MOD_RES (38)..(38): C-terminal amidation

SEQ ID NO: 1827 - protein, 38 aa, Artificial Sequence; identical to SEQ ID NO: 1813
  OXM analog
  MOD_RES (2)..(2): Xaa=Aib
  MOD_RES (27)..(27): Xaa=Nle
  MOD_RES (38)..(38): Xaa=Cys(cholest-5-en-3-yl{[(2R)-3-amino-2-(amino)- 3-oxopropyl]thio}acetate)
  MOD_RES (38)..(38): C-terminal amidation

SEQ ID NO: 1828 - protein, 38 aa, Artificial Sequence; identical to SEQ ID NO: 1813
  OXM analog
  MOD_RES (2)..(2): Xaa=Aib
  MOD_RES (27)..(27): Xaa=O-methyl-L-homoserine
  MOD_RES (38)..(38): Xaa=Cys(cholest-5-en-3-yl{[(2R)-3-amino-2-(amino)- 3-oxopropyl]thio}acetate)
  MOD_RES (38)..(38): C-terminal amidation

SEQ ID NO: 1829 - protein, 38 aa, Artificial Sequence; identical to SEQ ID NO: 1805
  OXM analog
  MOD_RES (2)..(2): Xaa=Aib
  MOD_RES (38)..(38): Xaa=Cys(cholest-5-en-3-yl 1-{[(2R)-3-amino-2-(amino)-3-oxopropyl]thio}-2-oxo -6,9,12,15-tetraoxa-3-azaoctadecan-18-oate]) or Cys(Oxa4-cholesterol))
  MOD_RES (38)..(38): C-terminal amidation

SEQ ID NO: 1830 - protein, 38 aa, Artificial Sequence; identical to SEQ ID NO: 1804
  OXM analog
  MOD_RES (2)..(2): Xaa=D-serine
  MOD_RES (38)..(38): C-terminal amidation

SEQ ID NO: 1831 - protein, 38 aa, Artificial Sequence; identical to SEQ ID NO: 1813
  OXM analog
  MOD_RES (2)..(2): Xaa=D-serine
  MOD_RES (27)..(27): Xaa=metionine sulfoxide
  MOD_RES (38)..(38): Xaa=Cys(cholest-5-en-3-yl 1-{[(2R)-3-amino-2-(amino)-3-oxopropyl]thio}-2-oxo -6,9,12,15-tetraoxa-3-azaoctadecan-18-oate]) or Cys(Oxa4-cholesterol))
  MOD_RES (38)..(38): C-terminal amidation

SEQ ID NO: 1832 - protein, 38 aa, Artificial Sequence; identical to SEQ ID NO: 1813
  OXM analog
  MOD_RES (2)..(2): Xaa=D-serine
  MOD_RES (27)..(27): Xaa=methionine sulfoxide
  MOD_RES (38)..(38): Xaa=Cys(CH2CONH2)
  MOD_RES (38)..(38): C-terminal amidation

SEQ ID NO: 1833 - protein, 37 aa, Artificial Sequence
  OXM analog
  MOD_RES (2)..(2): Xaa=1-Amino-1-cyclohexane carboxylic acid
  MOD_RES (37)..(37): C-terminal amidation
HXQGTFTSDYSKYLDSRRAQDFVQWLMNTKRNRNNIA

SEQ ID NO: 1834 - protein, 37 aa, Artificial Sequence; identical to SEQ ID NO: 1833
  OXM analog
  MOD_RES (2)..(2): Xaa=Abu
  MOD_RES (37)..(37): C-terminal amidation

SEQ ID NO: 1835 - protein, 37 aa, Artificial Sequence; identical to SEQ ID NO: 1833
  OXM analog
  MOD_RES (2)..(2): Xaa=D-abu
  MOD_RES (37)..(37): C-terminal amidation

SEQ ID NO: 1836 - protein, 37 aa, Artificial Sequence; identical to SEQ ID NO: 1833
  OXM analog
  MOD_RES (2)..(2): Xaa=Nva (Aminovaleric acid)
  MOD_RES (37)..(37): C-terminal amidation

SEQ ID NO: 1837 - protein, 37 aa, Artificial Sequence; identical to SEQ ID NO: 1833
  OXM analog
  MOD_RES (2)..(2): Xaa= beta-cyclopropyl-alanine
  MOD_RES (37)..(37): C-terminal amidation

SEQ ID NO: 1838 - protein, 37 aa, Artificial Sequence; identical to SEQ ID NO: 1833
  OXM analog
  MOD_RES (2)..(2): Xaa=propargylglycine
  MOD_RES (37)..(37): C-terminal amidation

SEQ ID NO: 1839 - protein, 37 aa, Artificial Sequence; identical to SEQ ID NO: 1833
  OXM analog
  MOD_RES (2)..(2): Xaa=Allylglycine
  MOD_RES (37)..(37): C-terminal amidation

SEQ ID NO: 1840 - protein, 37 aa, Artificial Sequence; identical to SEQ ID NO: 1833
  OXM analog
  MOD_RES (2)..(2): Xaa=2-Amino-2-cyclohexyl-propanoic acid
  MOD_RES (37)..(37): C-terminal amidation

SEQ ID NO: 1841 - protein, 37 aa, Artificial Sequence; identical to SEQ ID NO: 1833
  OXM analog
  MOD_RES (2)..(2): Xaa=D-tertbutylglycine
  MOD_RES (37)..(37): C-terminal amidation

SEQ ID NO: 1842 - protein, 37 aa, Artificial Sequence; identical to SEQ ID NO: 1833
  OXM analog
  MOD_RES (2)..(2): Xaa=Vinylglycine
  MOD_RES (37)..(37): C-terminal amidation

SEQ ID NO: 1843 - protein, 37 aa, Artificial Sequence; identical to SEQ ID NO: 1833
  OXM analog
  MOD_RES (2)..(2): Xaa=1-Amino-1-cyclopropane carboxylic acid
  MOD_RES (37)..(37): C-terminal amidation

SEQ ID NO: 1844 - protein, 37 aa, Artificial Sequence; identical to SEQ ID NO: 1833
  OXM analog
  MOD_RES (2)..(2): Xaa=1-Amino-1-cyclobutane carboxylic acid
  MOD_RES (37)..(37): C-terminal amidation

SEQ ID NO: 1845 - protein, 37 aa, Artificial Sequence; identical to SEQ ID NO: 1833
  OXM analog
  MOD_RES (2)..(2): Xaa=1-Amino-1-cyclopentane carboxylic acid
  MOD_RES (37)..(37): C-terminal amidation

SEQ ID NO: 1846 - protein, 38 aa, Artificial Sequence
  OXM analog
  MOD_RES (2)..(2): Xaa=D-serine
  MOD_RES (38)..(38): C-terminal amidation
HXQGTFTSDYSKYLDSEAAQDFVQWLMNTKRNRNNIAC

SEQ ID NO: 1847 - protein, 31 aa, Artificial Sequence
  OXM analog
  MOD_RES (2)..(2): Xaa=D-serine
  MOD_RES (31)..(31): C-terminal amidation
HXQGTFTSDYSKYLDSRRAQDFVQWLMNTKC

SEQ ID NO: 1848 - protein, 31 aa, Artificial Sequence
  OXM analog
  MOD_RES (2)..(2): Xaa=D-serine
  MOD_RES (31)..(31): C-terminal amidation
HXQGTFTSDYSKYLDSEAAQDFVQWLMNTKC

SEQ ID NO: 1849 - protein, 31 aa, Artificial Sequence
  OXM analog
  MOD_RES (2)..(2): Xaa=D-serine
  MOD_RES (31)..(31): C-terminal amidation
HXQGTFTSDYSKYLDSERAQDFVQWLMNTKC

SEQ ID NO: 1850 - protein, 31 aa, Artificial Sequence
  OXM analog
  MOD_RES (2)..(2): Xaa=D-serine
  MOD_RES (31)..(31): C-terminal amidation
HXQGTFTSDYSKYLDSRAAQDFVQWLMNTKC

SEQ ID NO: 1851 - protein, 38 aa, Artificial Sequence
  OXM analog
  MOD_RES (2)..(2): Xaa=D-serine
  MOD_RES (38)..(38): Xaa=Cys(cholest-5-en-3-yl 1-{[(2R)-3-amino-2-(amino)-3-oxopropyl]thio}-2-oxo -6,9,12,15-tetraoxa-3-azaoctadecan-18-oate]) or Cys(Oxa4-cholesterol))
  MOD_RES (38)..(38): C-terminal amidation
HXQGTFTSDYSKYLDSEAAQDFVQWLMNTKRNRNNIAX

SEQ ID NO: 1852 - protein, 31 aa, Artificial Sequence
  OXM analog
  MOD_RES (2)..(2): Xaa=D-serine
  MOD_RES (31)..(31): Xaa=Cys(cholest-5-en-3-yl 1-{[(2R)-3-amino-2-(amino)-3-oxopropyl]thio}-2-oxo -6,9,12,15-tetraoxa-3-azaoctadecan-18-oate]) or Cys(Oxa4-cholesterol))
  MOD_RES (31)..(31): C-terminal amidation
HXQGTFTSDYSKYLDSRRAQDFVQWLMNTKX

SEQ ID NO: 1853 - protein, 31 aa, Artificial Sequence
  OXM analog
  MOD_RES (2)..(2): X=D-serine
  MOD_RES (31)..(31): Xaa=Cys(cholest-5-en-3-yl 1-{[(2R)-3-amino-2-(amino)-3-oxopropyl]thio}-2-oxo -6,9,12,15-tetraoxa-3-azaoctadecan-18-oate]) or Cys(Oxa4-cholesterol))
  MOD_RES (31)..(31): C-terminal amidation
HXQGTFTSDYSKYLDSEAAQDFVQWLMNTKX

SEQ ID NO: 1854 - protein, 31 aa, Artificial Sequence
  OXM analog
  MOD_RES (2)..(2): Xaa=D-serine
  MOD_RES (31)..(31): Xaa=Cys(cholest-5-en-3-yl 1-{[(2R)-3-amino-2-(amino)-3-oxopropyl]thio}-2-oxo -6,9,12,15-tetraoxa-3-azaoctadecan-18-oate]) or Cys(Oxa4-cholesterol))
  MOD_RES (31)..(31): C-terminal amidation
HXQGTFTSDYSKYLDSERAQDFVQWLMNTKX

SEQ ID NO: 1855 - protein, 31 aa, Artificial Sequence
  OXM analog
  MOD_RES (2)..(2): Xaa=D-serine
  MOD_RES (31)..(31): Xaa=Cys(cholest-5-en-3-yl 1-{[(2R)-3-amino-2-(amino)-3-oxopropyl]thio}-2-oxo -6,9,12,15-tetraoxa-3-azaoctadecan-18-oate]) or Cys(Oxa4-cholesterol))
  MOD_RES (31)..(31): C-terminal amidation
HXQGTFTSDYSKYLDSRAAQDFVQWLMNTKX

SEQ ID NO: 1856 - protein, 31 aa, Artificial Sequence; identical to SEQ ID NO: 1852
  OXM analog
  MOD_RES (2)..(2): Xaa=D-serine
  MOD_RES (31)..(31): Xaa=Lys(Palmitoyl)
  MOD_RES (31)..(31): C-terminal amidation

SEQ ID NO: 1857 - protein, 31 aa, Artificial Sequence; identical to SEQ ID NO: 1853
  OXM analog
  MOD_RES (2)..(2): Xaa=D-serine
  MOD_RES (31)..(31): Xaa=Lys(palmitoyl)
  MOD_RES (31)..(31): C-terminal amidation

SEQ ID NO: 1858 - protein, 32 aa, Artificial Sequence
  OXM analog
  MOD_RES (2)..(2): Xaa=D-serine
  MOD_RES (31)..(31): Xaa=Ttds
  MOD_RES (32)..(32): Xaa=Lys(Palmitoyl)
  MOD_RES (32)..(32): C-terminal amidation
HXQGTFTSDYSKYLDSRRAQDFVQWLMNTKXX

SEQ ID NO: 1859 - protein, 32 aa, Artificial Sequence
  OXM analog
  MOD_RES (2)..(2): Xaa=D-serine
  MOD_RES (31)..(31): Xaa=Ttds
  MOD_RES (32)..(32): Xaa=Lys(Palmitoyl)
  MOD_RES (32)..(32): C-terminal amidation
HXQGTFTSDYSKYLDSEAAQDFVQWLMNTKXX

SEQ ID NO: 1860 - protein, 32 aa, Artificial Sequence; identical to SEQ ID NO: 1858
  OXM analog
  MOD_RES (2)..(2): Xaa=D-serine
  MOD_RES (31)..(31): Xaa=gamma glutamic acid
  MOD_RES (32)..(32): Xaa=Cys(cholest-5-en-3-yl{[(2R)-3-amino-2-(amino)- 3-oxopropyl]thio}acetate)
  MOD_RES (32)..(32): C-terminal amidation

SEQ ID NO: 1861 - protein, 32 aa, Artificial Sequence; identical to SEQ ID NO: 1859
  OXM analog
  MOD_RES (2)..(2): Xaa=D-serine
  MOD_RES (31)..(31): Xaa=gamma glutamic acid
  MOD_RES (32)..(32): Xaa=Cys(cholest-5-en-3-yl{[(2R)-3-amino-2-(amino)- 3-oxopropyl]thio}acetate)
  MOD_RES (32)..(32): C-terminal amidation

SEQ ID NO: 1862 - protein, 31 aa, Artificial Sequence; identical to SEQ ID NO: 1853
  OXM analog
  MOD_RES (2)..(2): Xaa=Aib
  MOD_RES (31)..(31): Xaa= Cys(cholest-5-en-3-yl 1-{[(2R)-3-amino-2-(amino)-3-oxopropyl]thio}-2-oxo -6,9,12,15-tetraoxa-3-azaoctadecan-18-oate]) or Cys(Oxa4-cholesterol))
  MOD_RES (31)..(31): C-terminal amidation

SEQ ID NO: 1863 - protein, 39 aa, Artificial Sequence
  OXM analog
  MOD_RES (2)..(2): Xaa=D-serine
  MOD_RES (38)..(38): Xaa=gamma glutamic acid
  MOD_RES (39)..(39): Xaa=Cys(cholest-5-en-3-yl{[(2R)-3-amino-2-(amino)- 3-oxopropyl]thio}acetate)
  MOD_RES (39)..(39): C-terminal amidation
HXQGTFTSDYSKYLDSEAAQDFVQWLMNTKRNRNNIAXX

SEQ ID NO: 1864 - protein, 32 aa, Artificial Sequence
  OXM analog
  MOD_RES (2)..(2): Xaa=D-serine
  MOD_RES (32)..(32): Xaa=Cys(cholest-5-en-3-yl 1-{[(2R)-3-amino-2-(amino)-3-oxopropyl]thio}-2-oxo -6,9,12,15-tetraoxa-3-azaoctadecan-18-oate]) or Cys(Oxa4-cholesterol))
  MOD_RES (32)..(32): C-terminal amidation
HXQGTFTSDYSKYLDSEAAQDFVQWLMNTKRX

SEQ ID NO: 1865 - protein, 38 aa, Artificial Sequence; identical to SEQ ID NO: 1851
  OXM analog
  MOD_RES (2)..(2): Xaa=D-serine
  MOD_RES (38)..(38): Xaa=Cys(cholest-5-en-3-yl 1-{[(2R)-3-amino-2-(amino)-3-oxopropyl]thio}-2-oxo -6,9,12,15-tetraoxa-3-azaoctadecan-18-oate]) or Cys(Oxa4-cholesterol))

SEQ ID NO: 1866 - protein, 31 aa, Artificial Sequence; identical to SEQ ID NO: 1854
  OXM analog
  MOD_RES (2)..(2): Xaa=Aib
  MOD_RES (31)..(31): Xaa=Cys(cholest-5-en-3-yl 1-{[(2R)-3-amino-2-(amino)-3-oxopropyl]thio}-2-oxo -6,9,12,15-tetraoxa-3-azaoctadecan-18-oate]) or Cys(Oxa4-cholesterol))
  MOD_RES (31)..(31): C-terminal amidation

SEQ ID NO: 1867 - protein, 32 aa, Artificial Sequence; identical to SEQ ID NO: 1858
  OXM analog
  MOD_RES (2)..(2): Xaa=Aib
  MOD_RES (31)..(31): Xaa=gamma glutamic acid
  MOD_RES (32)..(32): Xaa=Cys(cholest-5-en-3-yl{[(2R)-3-amino-2-(amino)- 3-oxopropyl]thio}acetate)

SEQ ID NO: 1868 - protein, 39 aa, Artificial Sequence; identical to SEQ ID NO: 1863
  OXM analog
  MOD_RES (2)..(2): Xaa=D-serine
  MOD_RES (38)..(38): Xaa=gamma glutamic acid
  MOD_RES (39)..(39): Xaa=Lys(Palmitoyl)
  MOD_RES (39)..(39): C-terminal amidation

SEQ ID NO: 1869 - protein, 33 aa, Artificial Sequence
  OXM analog
  MOD_RES (2)..(2): Xaa=D-serine
  MOD_RES (31)..(32): Xaa=gamma glutamic acid
  MOD_RES (33)..(33): Xaa=Cys(cholest-5-en-3-yl{[(2R)-3-amino-2-(amino)- 3-oxopropyl]thio}acetate)
HXQGTFTSDYSKYLDSRRAQDFVQWLMNTKXXX

SEQ ID NO: 1870 - protein, 32 aa, Artificial Sequence
  OXM analog
  MOD_RES (2)..(2): Xaa=D-serine
  MOD_RES (31)..(31): Xaa=gamma glutamic acid
  MOD_RES (32)..(32): Xaa=Cys(cholest-5-en-3-yl 1{[(2R)-3-amino-2-(amino)-3-oxopropyl]thio}acetate )
HXQGTFTSDYSSYLDSRRAQDFVQWLMNTKXX

SEQ ID NO: 1871 - protein, 32 aa, Artificial Sequence
  OXM analog
  MOD_RES (2)..(2): Xaa=D-serine
  MOD_RES (31)..(31): Xaa=gamma glutamic acid
  MOD_RES (32)..(32): Xaa=Cys(cholest-5-en-3-yl 1{[(2R)-3-amino-2-(amino)-3-oxopropyl]thio}acetate );
HXQGTFTSDYSKYLDSRAAQDFVQWLMNTKXX

SEQ ID NO: 1872 - protein, 32 aa, Artificial Sequence; identical to SEQ ID NO: 1870
  OXM analog
  MOD_RES (2)..(2): Xaa=D-serine
  MOD_RES (31)..(31): Xaa=gamma glutamic acid
  MOD_RES (32)..(32): Xaa=Cys(cholest-5-en-3-yl 1-{[(2R)-3-amino-2-(amino)-3-oxopropyl]thio}-2-oxo -6,9,12,15-tetraoxa-3-azaoctadecan-18-oate]) or Cys(Oxa4-cholesterol)

SEQ ID NO: 1873 - protein, 32 aa, Artificial Sequence; identical to SEQ ID NO: 1871
  OXM analog
  MOD_RES (2)..(2): Xaa=D-serine
  MOD_RES (31)..(31): Xaa=gamma glutamic acid
  MOD_RES (32)..(32): Xaa=Cys(cholest-5-en-3-yl 1-{[(2R)-3-amino-2-(amino)-3-oxopropyl]thio}-2-oxo -6,9,12,15-tetraoxa-3-azaoctadecan-18-oate]) or Cys(Oxa4-cholesterol)

SEQ ID NO: 1874 - protein, 32 aa, Artificial Sequence
  OXM analog
  MOD_RES (2)..(2): Xaa=D-serine
  MOD_RES (31)..(31): Xaa=gamma glutamic acid
  MOD_RES (32)..(32): Xaa=Cys(cholest-5-en-3-yl 1{[(2R)-3-amino-2-(amino)-3-oxopropyl]thio}acetate )
HXQGTFTSDYSKYLDERRAQDFVQWLMNTKXX

SEQ ID NO: 1875 - protein, 32 aa, Artificial Sequence; identical to SEQ ID NO: 1874
  OXM analog
  MOD_RES (2)..(2): Xaa=D-serine
  MOD_RES (31)..(31): Xaa=gamma glutamic acid
  MOD_RES (32)..(32): Xaa=Cys(cholest-5-en-3-yl 1-{[(2R)-3-amino-2-(amino)-3-oxopropyl]thio}-2-oxo -6,9,12,15-tetraoxa-3-azaoctadecan-18-oate]) or Cys(Oxa4-cholesterol)

SEQ ID NO: 1876 - protein, 33 aa, Artificial Sequence; identical to SEQ ID NO: 1869
  OXM analog
  MOD_RES (2)..(2): Xaa=D-serine
  MOD_RES (31)..(32): Xaa=gamma glutamic acid
  MOD_RES (33)..(33): Xaa=Cys(cholest-5-en-3-yl 1-{[(2R)-3-amino-2-(amino)-3-oxopropyl]thio}-2-oxo -6,9,12,15-tetraoxa-3-azaoctadecan-18-oate]) or Cys(Oxa4-cholesterol)

SEQ ID NO: 1877 - protein, 33 aa, Artificial Sequence; identical to SEQ ID NO: 1869
  OXM analog
  MOD_RES (2)..(2): Xaa=D-serine
  MOD_RES (31)..(32): Xaa=gamma glutamic acid
  MOD_RES (33)..(33): Xaa=S-{1-[46-(cholest-5-en-3-yloxy)-3,43,46-trioxo -7,10,13,16,19,22,25,28,31,34,37,40-dodecaoxa-4,44 -diazahexatetracont-1-yl]-2,5-dioxopyrrolidin-3-yl }-L-cysteine or Cys (mal-oxa12-cholesterol)

SEQ ID NO: 1878 - protein, 33 aa, Artificial Sequence; identical to SEQ ID NO: 1869
  OXM analog
  MOD_RES (2)..(2): Xaa=Aib
  MOD_RES (31)..(32): Xaa=gamma glutamic acid
  MOD_RES (33)..(33): Xaa== Cys(cholest-5-en-3-yl 1-{[(2R)-3-amino-2-(amino)-3-oxopropyl]thio}-2-oxo -6,9,12,15-tetraoxa-3-azaoctadecan-18-oate]) or Cys(Oxa4-cholesterol)

SEQ ID NO: 1879 - protein, 33 aa, Artificial Sequence; identical to SEQ ID NO: 1869
  OXM analog
  MOD_RES (2)..(2): Xaa=1-Amino-1-cyclobutane carboxylic acid
  MOD_RES (31)..(32): Xaa=gamma glutamic acid
  MOD_RES (33)..(33): Xaa=Cys(cholest-5-en-3-yl 1-{[(2R)-3-amino-2-(amino)-3-oxopropyl]thio}-2-oxo -6,9,12,15-tetraoxa-3-azaoctadecan-18-oate]) or Cys(Oxa4-cholesterol)

SEQ ID NO: 1880 - protein, 33 aa, Artificial Sequence
  OXM analog
  MOD_RES (2)..(2): Xaa=D-serine
  MISC_FEATURE (16)..(20): Lactam bridge between side chains
  MOD_RES (31)..(32): Xaa=gamma glutamic acid
  MOD_RES (33)..(33): Xaa=S-[42-(cholest-5-en-3-yloxy)-2,42-dioxo-6,9,12 ,15,18,21,24,27,30,33,36,39-dodecaoxa-3-azadotetra cont-1-yl]-L-cysteine or Cys (oxa12-cholesterol)
HXQGTFTSDYSKYLDERRAKDFVQWLMNTKXXX

SEQ ID NO: 1881 - protein, 33 aa, Artificial Sequence; identical to SEQ ID NO: 1880
  OXM analog
  MOD_RES (2)..(2): Xaa=Aib
  MISC_FEATURE (16)..(20): Lactam bridge between side chains
  MOD_RES (31)..(32): Xaa=gamma glutamic acid
  MOD_RES (33)..(33): Xaa=S-[42-(cholest-5-en-3-yloxy)-2,42-dioxo-6,9,12 ,15,18,21,24,27,30,33,36,39-dodecaoxa-3-azadotetra cont-1-yl]-L-cysteine or Cys (oxa12-cholesterol)

SEQ ID NO: 1882 - protein, 33 aa, Artificial Sequence; identical to SEQ ID NO: 1880
  OXM analog
  MOD_RES (2)..(2): Xaa=1-Amino-1-cyclobutane carboxylic acid
  MISC_FEATURE (16)..(20): Lactam bridge between side chains
  MOD_RES (31)..(32): Xaa=gamma glutamic acid
  MOD_RES (33)..(33): Xaa=S-[42-(cholest-5-en-3-yloxy)-2,42-dioxo-6,9,12 ,15,18,21,24,27,30,33,36,39-dodecaoxa-3-azadotetra cont-1-yl]-L-cysteine or Cys (oxa12-cholesterol)

SEQ ID NO: 1883 - protein, 33 aa, Artificial Sequence; identical to SEQ ID NO: 1869
  OXM analog
  MOD_RES (2)..(2): Xaa=D-serine
  MOD_RES (31)..(32): Xaa=gamma glutamic acid
  MOD_RES (33)..(33): Xaa=S-[42-(cholest-5-en-3-yloxy)-2,42-dioxo-6,9,12 ,15,18,21,24,27,30,33,36,39-dodecaoxa-3-azadotetra cont-1-yl]-L-cysteine or Cys (oxa12-cholesterol)

SEQ ID NO: 1884 - protein, 33 aa, Artificial Sequence; identical to SEQ ID NO: 1869
  OXM analog
  MOD_RES (2)..(2): Xaa=Aib
  MOD_RES (31)..(32): Xaa=gamma glutamic acid
  MOD_RES (33)..(33): Xaa=S-[42-(cholest-5-en-3-yloxy)-2,42-dioxo-6,9,12 ,15,18,21,24,27,30,33,36,39-dodecaoxa-3-azadotetra cont-1-yl]-L-cysteine or Cys (oxa12-cholesterol)

SEQ ID NO: 1885 - protein, 33 aa, Artificial Sequence; identical to SEQ ID NO: 1869
  OXM analog
  MOD_RES (2)..(2): Xaa=1-Amino-1-cyclobutane carboxylic acid
  MOD_RES (31)..(32): Xaa=gamma glutamic acid
  MOD_RES (33)..(33): Xaa=S-[42-(cholest-5-en-3-yloxy)-2,42-dioxo-6,9,12 ,15,18,21,24,27,30,33,36,39-dodecaoxa-3-azadotetra cont-1-yl]-L-cysteine or Cys (oxa12-cholesterol)

SEQ ID NO: 1886 - protein, 33 aa, Artificial Sequence; identical to SEQ ID NO: 1869
  OXM analog
  MOD_RES (2)..(2): Xaa=D-serine
  MOD_RES (31)..(32): Xaa=gamma glutamic acid
  MOD_RES (33)..(33): Xaa=Lys(gamma-glutamic acid-palmitoyl)
  MOD_RES (33)..(33): C-terminal amidation

SEQ ID NO: 1887 - protein, 33 aa, Artificial Sequence
  OXM analog
  MOD_RES (2)..(2): Xaa=D-serine
  MOD_RES (31)..(32): Xaa=gamma glutamic acid
  MOD_RES (33)..(33): Xaa=S-[42-(cholest-5-en-3-yloxy)-2,42-dioxo-6,9,12 ,15,18,21,24,27,30,33,36,39-dodecaoxa-3-azadotetra cont-1-yl]-L-cysteine or Cys (oxa12-cholesterol)
  MOD_RES (33)..(33): C-terminal amidation
HXQGTFTSDYSKYLDERRAQDFVQWLMNTKXXX

SEQ ID NO: 1888 - protein, 32 aa, Artificial Sequence
  OXM analog
  MOD_RES (2)..(2): Xaa=D-serine
  MOD_RES (20)..(20): Xaa=Lys(gamma-glutamic acid-palmitoyl)
  MOD_RES (31)..(32): Xaa=gamma glutamic acid
  MOD_RES (32)..(32): C-terminal amidation
HXQGTFTSDYSKYLDSRRAXDFVQWLMNTKXX

SEQ ID NO: 1889 - protein, 31 aa, Artificial Sequence
  OXM analog
  MOD_RES (2)..(2): Xaa=D-serine
  MOD_RES (20)..(20): Xaa=Lys(gamma-glutamic acid-gamma-glutamic acid-palmitoyl)
  MOD_RES (31)..(31): Xaa=gamma glutamic acid
  MOD_RES (31)..(31): C-terminal amidation
HXQGTFTSDYSKYLDSRRAXDFVQWLMNTKX

SEQ ID NO: 1890 - protein, 30 aa, Artificial Sequence
  OXM analog
  MOD_RES (2)..(2): Xaa=D-serine
  MOD_RES (10)..(10): Xaa=Lys(gamma-glutamic acid-gamma-glutamic acid-palmitoyl)
  MOD_RES (30)..(30): C-terminal amidation
HXQGTFTSDXSKYLDSRRAQDFVQWLMNTK

SEQ ID NO: 1891 - protein, 30 aa, Artificial Sequence
  OXM analog
  MOD_RES (2)..(2): Xaa=D-serine
  MOD_RES (20)..(20): Xaa=Lys(gamma-glutamic acid-gamma-glutamic acid-palmitoyl)
  MOD_RES (30)..(30): C-terminal amidation
HXQGTFTSDYSKYLDERRAXDFVQWLMNTK

SEQ ID NO: 1892 - protein, 30 aa, Artificial Sequence
  OXM analog
  MOD_RES (2)..(2): Xaa=D-serine
  MOD_RES (10)..(10): Xaa=Lys(gamma-glutamic acid-gamma-glutamic acid-palmitoyl)
  MOD_RES (30)..(30): C-terminal amidation
HXQGTFTSDXSKYLDERRAQDFVQWLMNTK

SEQ ID NO: 1893 - protein, 33 aa, Artificial Sequence; identical to SEQ ID NO: 1869
  OXM analog
  MOD_RES (2)..(2): Xaa=D-serine
  MOD_RES (31)..(32): Xaa=gamma glutamic acid
  MOD_RES (33)..(33): Xaa=S-[78-(cholest-5-en-3-yloxy)-2,78-dioxo-6,9,12 ,15,18,21,24,27,30,33,36,39,42,45,48,51,54,57,60,6 3,66,69,72,75-tetracosaoxa-3-azaoctaheptacont-1-yl ]-L-cysteine or Cys (oxa24-cholesterol)

SEQ ID NO: 1894 - protein, 33 aa, Artificial Sequence
  OXM analog
  MOD_RES (2)..(2): Xaa=Aib
  MOD_RES (24)..(24): Xaa=Lys(DOTA)
  MOD_RES (27)..(27): Xaa=methionine sulfoxide
  MOD_RES (31)..(32): Xaa=gamma glutamic acid
  MOD_RES (33)..(33): Xaa=S-[42-(cholest-5-en-3-yloxy)-2,42-dioxo-6,9,12 ,15,18,21,24,27,30,33,36,39-dodecaoxa-3-azadotetra cont-1-yl]-L-cysteine or Cys (oxa12-cholesterol)
  MOD_RES (33)..(33): C-terminal amidation
HXDGTFTSDYSKYLDSRRAQDFVXWLXNTKXXX

SEQ ID NO: 1895 - protein, 31 aa, Artificial Sequence
  OXM analog
  MOD_RES (2)..(2): Xaa=D-serine
  MOD_RES (10)..(10): Xaa=Lys(gamma glutamic acid-palmitoyl)
  MOD_RES (31)..(31): Xaa=gamma glutamic acid
  MOD_RES (31)..(31): C-terminal amidation
HXQGTFTSDXSKYLDERRAQDFVQWLMNTKX

SEQ ID NO: 1896 - protein, 32 aa, Artificial Sequence
  OXM analog
  MOD_RES (2)..(2): Xaa=D-serine
  MOD_RES (10)..(10): Xaa=Lys(palmitoyl)
  MOD_RES (31)..(32): Xaa=gamma glutamic acid
  MOD_RES (32)..(32): C-terminal amidation
HXQGTFTSDXSKYLDERRAQDFVQWLMNTKXX

SEQ ID NO: 1897 - protein, 30 aa, Artificial Sequence; identical to SEQ ID NO: 1892
  OXM analog
  MOD_RES (2)..(2): Xaa=aib
  MOD_RES (10)..(10): Xaa=Lys(gamma-glutamic acid-gamma glutamic acid-palmitoyl)
  MOD_RES (30)..(30): C-terminal amidation

SEQ ID NO: 1898 - protein, 30 aa, Artificial Sequence; identical to SEQ ID NO: 1892
  OXM analog
  MOD_RES (2)..(2): Xaa=acb
  MOD_RES (10)..(10): Xaa=Lys(gamma-glutamic acid-gamma-glutamic acid-palmitoyl
  MOD_RES (30)..(30): C-terminal amidation

SEQ ID NO: 1899 - protein, 31 aa, Artificial Sequence; identical to SEQ ID NO: 1895
  OXM analog
  MOD_RES (2)..(2): Xaa=D-Serine
  MOD_RES (10)..(10): Xaa=Lys(gamma-glutamic acid-gamma-glutamic acid-palmitoyl
  MOD_RES (16)..(16): Xaa=aib
  MOD_RES (31)..(31): Xaa=gamma glutamic acid
  MOD_RES (31)..(31): C-terminal amidation

SEQ ID NO: 1900 - protein, 33 aa, Artificial Sequence; identical to SEQ ID NO: 1869
  OXM analog
  MOD_RES (2)..(2): Xaa=aib
  MOD_RES (31)..(32): Xaa=gamma glutamic acid
  MOD_RES (33)..(33): Xaa=Lys(gamma glutamic acid-palmitoyl)
  MOD_RES (33)..(33): C-terminal amidation

SEQ ID NO: 1901 - protein, 33 aa, Artificial Sequence; identical to SEQ ID NO: 1869
  OXM analog
  MOD_RES (2)..(2): Xaa=acb
  MOD_RES (31)..(32): Xaa=gamma glutamic acid
  MOD_RES (33)..(33): Xaa=Lys(gamma glutamic acid-palmitoyl)
  MOD_RES (33)..(33): C-terminal amidation

SEQ ID NO: 1902 - protein, 33 aa, Artificial Sequence; identical to SEQ ID NO: 1869
  OXM analog
  MOD_RES (2)..(2): Xaa=D-serine
  MOD_RES (31)..(32): Xaa=gamma glutamic acid
  MOD_RES (33)..(33): Xaa=S-[38-(cholest-5-en-3-yloxy)-2-oxo-6,9,12,15,1 8,21,24,27,30,33,36-undecaoxa-3-azaoctatriacont-1- yl]-L-cysteine or Cys (oxa12-O-cholesterol)

SEQ ID NO: 1903 - protein, 30 aa, Artificial Sequence
  OXM analog
  VARIANT (2)..(2): Xaa=D-serine or Aib;
  VARIANT (17)..(17): Xaa=Arg or Glu
  VARIANT (18)..(18): Xaa=Arg or Ala
  VARIANT (27)..(27): Xaa=methionine, norleucine, or O-methyl-L-homoserine
HXQGTFTSDYSKYLDSXXAQDFVQWLXNTK

SEQ ID NO: 1904 - protein, 7 aa, Artificial Sequence
  OXM peptide
RNRNNIA

SEQ ID NO: 1905 - protein, 37 aa, Artificial Sequence
  OXM analog
  VARIANT (2)..(2): Xaa=D-serine; Aib; Acb; 1-Amino-1-cyclohexane carboxylic acid (Acx); alpha-aminobutyric acid(Abu); D- alpha-aminobutyric acid (D-Abu); Aminovaleric acid Nva); beta-cyclopropyl-alanine (Cpa); propargylglycine (Prg); Allylglycine (Alg);
  VARIANT (17)..(17): Xaa=Arg or Glu
  VARIANT (18)..(18): Xaa=Arg or Ala
  VARIANT (27)..(27): Xaa=methionine (M), norleucine (Nle), methionine sulfoxide (m) or O-methyl-L-homoserine (o)
HXQGTFTSDYSKYLDSXXAQDFVQWLXNTKRNRNNIA

SEQ ID NO: 1906 - protein, 37 aa, Artificial Sequence
  OXM analog
  VARIANT (2)..(2): Xaa = D-Ser,  Aib,  Acb, Acx,  Abu, D-Abu, Aminovaleric acid (Nva), Cpa, Prg, Alg, 2-Cha, D-tbg, Vg, Acp, or Acpe
  VARIANT (12)..(12): Xaa=Ser or Lys
  VARIANT (16)..(16): Xaa=Ser or Glu
  VARIANT (17)..(17): Xaa=Arg or Glu
  VARIANT (18)..(18): Xaa=Arg or Ala
  VARIANT (20)..(20): Xaa=Gln or Lys
  VARIANT (27)..(27): Xaa=a methionine, norleucine, methionine sulfoxide, or O-methyl-L-homoserine
HXQGTFTSDYSXYLDXXXAXDFVQWLXNTKRNRNNIA

SEQ ID NO: 1907 - protein, 31 aa, Artificial Sequence
  OXM analog
  VARIANT (2)..(2): Xaa = D-Ser,  Aib,  Acb, Acx,  Abu, D-Abu, Aminovaleric acid (Nva), Cpa, Prg, Alg, 2-Cha, D-tbg, Vg, Acp, or Acpe
  VARIANT (10)..(10): Xaa=Tyr or Lys
  VARIANT (12)..(12): Xaa=Ser or Lys
  VARIANT (16)..(16): Xaa=Ser or Glu
  VARIANT (17)..(17): Xaa=Arg or Glu
  VARIANT (18)..(18): Xaa=Arg or Ala
  VARIANT (20)..(20): Xaa=Gln or Lys
  VARIANT (27)..(27): Xaa=methionine, norleucine, methionine sulfoxide, or O-methyl-L-homoserine
  VARIANT (31)..(31): Xaa=optional, but when present is one or more gamma glutamic acid residues
HXQGTFTSDXSXYLDXXXAXDFVQWLXNTKX

SEQ ID NO: 1908 - protein, 31 aa, Artificial Sequence; identical to SEQ ID NO: 1907
  OXM analog
  MOD_RES (2)..(2): Xaa = D-Ser,  Aib,  Acb, Acx,  Abu, D-Abu, Aminovaleric acid (Nva), Cpa, Prg, Alg, 2-Cha, D-tbg, Vg, Acp, or Acpe
  MOD_RES (10)..(10): Xaa=Tyr or Lys
  MOD_RES (12)..(12): Xaa=Ser or Lys
  MOD_RES (16)..(16): Xaa=Ser or Lys
  MOD_RES (17)..(17): Xaa=Arg or Glu
  MOD_RES (18)..(18): Xaa=Arg or Ala
  MOD_RES (20)..(20): Xaa=Gln or Lys
  MOD_RES (27)..(27): Xaa=methionine, norleucine, methionine sulfoxide, or O-methyl-L-homoserine
  MOD_RES (31)..(31): optional, but when present one or more gamma glutamic acid residues

SEQ ID NO: 1909 - protein, 30 aa, Artificial Sequence
  OXM analog
HSQGTFTSDSSKYLDSRRAQDFVQWLMNTK

SEQ ID NO: 1910 - protein, 32 aa, Artificial Sequence
  OXM analog
  MOD_RES (2)..(2): Xaa=D-serine, Aib, Acb, Acx, Abu, D-Abu,  Aminovaleric acid (Nva), Cpa, Prg, Alg, 2-Cha, D-tbg, Vg, Acp, or Acpe
  MOD_RES (10)..(10): Xaa=Tyr or Lys
  MOD_RES (12)..(12): Xaa=Ser or Lys
  MOD_RES (16)..(16): Xaa=Ser, aib,  or Glu
  MOD_RES (17)..(17): Xaa=Arg or Glu
  MOD_RES (18)..(18): Xaa=Arg or Ala
  MOD_RES (20)..(20): Xaa=Glu or Lys
  MOD_RES (27)..(27): Xaa=Met, norleucine, methionine sulfoxide, or O-methyl-L-homoserine
  MOD_RES (31)..(31): Xaa=gamma-glutamic acid
  MOD_RES (32)..(32): Xaa=is optional but when present, it is gamma-glutamic acid
HXQGTFTSDXSXYLDXXXAXDFVQWLXNTKXX

SEQ ID NO: 1911 - protein, 31 aa, Artificial Sequence
  OXM analog
  MOD_RES (2)..(2): Xaa=D-serine
  MOD_RES (10)..(10): Xaa=Lys(gamma-glutamic acid-gamma-glutamic acid-palmitoyl)
  MOD_RES (16)..(16): Xaa=Aib
  MOD_RES (31)..(31): Xaa=gamma-glutamic acid
  MOD_RES (31)..(31): C-terminal amidation
HXQGTFTSDXSKYLDXRRAQDFVQWLMNTEX

SEQ ID NO: 1912 - protein, 31 aa, Artificial Sequence
  OXM analog
  MOD_RES (2)..(2): Xaa=D-serine
  MOD_RES (10)..(10): Xaa=Lys(gamma-glutamic acid-gamma-glutamic acid-palmitoyl)
  MOD_RES (16)..(16): Xaa=aib
  MOD_RES (30)..(30): Xaa=D-Lys
  MOD_RES (31)..(31): Xaa=gamma-glutamic acid
  MOD_RES (31)..(31): C-terminal amidation
HXQGTFTSDXSKYLDXRRAQDFVQWLMNTXX

SEQ ID NO: 1913 - protein, 31 aa, Artificial Sequence; identical to SEQ ID NO: 1895
  OXM analog
  MOD_RES (2)..(2): Xaa=D-serine
  MOD_RES (10)..(10): Xaa=Lys(gamma-glutamic acid-gamma-glutamic acid-palmitoyl)
  MOD_RES (31)..(31): Xaa=gamma-glutamic acid
  MOD_RES (31)..(31): C-terminal amidation

SEQ ID NO: 1914 - protein, 31 aa, Artificial Sequence; identical to SEQ ID NO: 1911
  OXM analog
  MOD_RES (2)..(2): Xaa=D-serine
  MOD_RES (10)..(10): Xaa=Lys(gamma-glutamic acid-gamma-glutamic acid-palmitoyl)
  MOD_RES (16)..(16): Xaa=aib
  MOD_RES (31)..(31): Xaa=gamma-D-glutamic acid

SEQ ID NO: 1915 - protein, 31 aa, Artificial Sequence; identical to SEQ ID NO: 1895
  OXM analog
  MOD_RES (2)..(2): Xaa=D-serine
  MOD_RES (10)..(10): Xaa=Lys(glutamic acid-glutamic acid-palmitoyl)
  MOD_RES (31)..(31): Xaa=gamma-glutamic acid
  MOD_RES (31)..(31): C-terminal amidation

SEQ ID NO: 1916 - protein, 31 aa, Artificial Sequence; identical to SEQ ID NO: 1895
  OXM analog
  MOD_RES (2)..(2): Xaa=D-serine
  MOD_RES (10)..(10): Xaa=Lys(Arg-Arg-palmitoyl)
  MOD_RES (31)..(31): Xaa=gamma-glutamic acid
  MOD_RES (31)..(31): C-terminal amidation

SEQ ID NO: 1917 - protein, 31 aa, Artificial Sequence; identical to SEQ ID NO: 1895
  OXM analog
  MOD_RES (2)..(2): Xaa=D-Serine
  MOD_RES (10)..(10): Xaa=Lys(homocysteic acid-homocysteic acid-palmitoyl)
  MOD_RES (31)..(31): Xaa=gamma-glutamic acid
  MOD_RES (31)..(31): C-terminal amidation

SEQ ID NO: 1918 - protein, 31 aa, Artificial Sequence; identical to SEQ ID NO: 1895
  OXM analog
  MOD_RES (2)..(2): Xaa=D-Serine
  MOD_RES (10)..(10): Xaa=Lys(D-glutamic acid-D-glutamic acid-palmitoyl)
  MOD_RES (31)..(31): Xaa=gamma-glutamic acid
  MOD_RES (31)..(31): C-terminal amidation

SEQ ID NO: 1919 - protein, 31 aa, Artificial Sequence
  OXM analog
  MOD_RES (2)..(2): Xaa=D-Serine
  MOD_RES (10)..(10): Xaa=Lys(gamma-glutamic acid-gamma-glutamic acid-myristoyl)
  MOD_RES (16)..(16): Xaa=aib
  MOD_RES (31)..(31): Xaa=gamma-glutamic acid
  MOD_RES (31)..(31): C-terminal amidation
HXQGTFTSDXSKYLDXRRAQDFVQWLMNTKX

SEQ ID NO: 1920 - protein, 31 aa, Artificial Sequence
  OXM analog
  MOD_RES (2)..(2): Xaa=D-Serine
  MOD_RES (10)..(10): Xaa=Lys(gamma-glutamic acid-gamma-glutamic acid-palmitoyl)
  MOD_RES (16)..(16): Xaa=aib
  MOD_RES (31)..(31): Xaa=gamma-glutamic acid
  MOD_RES (31)..(31): C-terminal amidation
HXQGTFTSDXSKYLDXRAAQDFVQWLMDTKX

SEQ ID NO: 1921 - protein, 31 aa, Artificial Sequence; identical to SEQ ID NO: 1919
  OXM analog
  MOD_RES (2)..(2): Xaa=D-Serine
  MOD_RES (10)..(10): Xaa=Lys(gamma-glutamic acid-gamma-glutamic acid-stearoyl)
  MOD_RES (16)..(16): Xaa=aib
  MOD_RES (31)..(31): Xaa=gamma-glutamic acid
  MOD_RES (31)..(31): C-terminal amidation

SEQ ID NO: 1922-2000 - skipped (79 entries)

SEQ ID NO: 2001 - protein, 29 aa, Homo sapiens
  MISC_FEATURE: Wild type glucagon
HSQGTFTSDYSKYLDSRRAQDFVQWLMNT

SEQ ID NO: 2002 - protein, 42 aa, Homo sapiens; identical to SEQ ID NO: 707
  MISC_FEATURE: Native human GIP
  CHAIN (1)..(42)

SEQ ID NO: 2003 - protein, 30 aa, Artificial sequence; identical to SEQ ID NO: 52
  Synthetic polypeptide
  MISC_FEATURE (1)..(30): GLP-1(7-36) amidated
  MISC_FEATURE (30)..(30): C-terminal amidation

SEQ ID NO: 2004 - protein, 31 aa, Homo sapiens; identical to SEQ ID NO: 50
  MISC_FEATURE (1)..(31): GLP-1(7-37)

SEQ ID NO: 2005 - protein, 10 aa, Artificial Sequence
  Synthetic peptide
GPSSGAPPPS

SEQ ID NO: 2006 - protein, 11 aa, Artificial Sequence
  Synthetic peptide
GGPSSGAPPPS

SEQ ID NO: 2007 - protein, 8 aa, Artificial Sequence
  Synthetic peptide
KRNRNNIA

SEQ ID NO: 2008 - protein, 4 aa, Artificial Sequence
  Synthetic peptide
KRNR

SEQ ID NO: 2009 - protein, 11 aa, Artificial Sequence
  Synthetic peptide
GPSSGAPPPSK

SEQ ID NO: 2010 - protein, 39 aa, Artificial Sequence
  Synthetic peptide
  MISC_FEATURE (2)..(2): Xaa is AIB
  MISC_FEATURE (10)..(10): Covalently bound to a C16 fatty acyl group via gamma-Glu spacer
  MISC_FEATURE (39)..(39): C-terminal amidation
HXQGTFTSDKSKYLDERAAQDFVQWLLDGGPSSGAPPPS

SEQ ID NO: 2011 - protein, 41 aa, Artificial Sequence
  Synthetic peptide
  MISC_FEATURE (2)..(2): Xaa is AIB
  MISC_FEATURE (40)..(40): Covalently bound to a C16 fatty acyl group via gamma-Glu-gamma-Glu spacer
  MISC_FEATURE (41)..(41): C-terminal amidation
HXQGTFTSDYSKYLDERAAQDFVQWLLDGGPSSGAPPPSKG

SEQ ID NO: 2012 - protein, 39 aa, Artificial Sequence
  Synthetic peptide
  MISC_FEATURE (2)..(2): Xaa is AIB
  MISC_FEATURE (10)..(10): Covalently bound to a C16 fatty acyl group via gamma-Glu spacer
  MISC_FEATURE (39)..(39): C-terminal amidation
HXEGTFTSDKSKYLDERAAQDFVQWLLDGGPSSGAPPPS

SEQ ID NO: 2013 - protein, 39 aa, Artificial Sequence
  Synthetic peptide
  MISC_FEATURE (2)..(2): Xaa is AIB
  MISC_FEATURE (10)..(10): Covalently bound to a C16 fatty acyl group via gamma-Glu spacer
  MISC_FEATURE (39)..(39): C-terminal amidation
HXQGTFTSDKSKYLDERRAQDFVQWLLDGGPSSGAPPPS

SEQ ID NO: 2014 - protein, 41 aa, Artificial Sequence
  Synthetic peptide
  MISC_FEATURE (2)..(2): Xaa is AIB
  MISC_FEATURE (40)..(40): Covalently bound to a C16 fatty acyl group via gamma-Glu-gamma-Glu spacer
  MISC_FEATURE (41)..(41): C-terminal amidation
HXQGTFTSDYSKYLDERAAQDFVQWLLDGEPSSGAPPPSKG

SEQ ID NO: 2015 - protein, 41 aa, Artificial Sequence
  Synthetic peptide
  MISC_FEATURE (2)..(2): Xaa is AIB
  MISC_FEATURE (40)..(40): Covalently bound to a C16 fatty acyl group via gamma-Glu-gamma-Glu spacer
  MISC_FEATURE (41)..(41): C-terminal amidation
HXQGTFTSDYSKYLEERAAQDFVQWLLDGGPSSGAPPPSKG

SEQ ID NO: 2016 - protein, 41 aa, Artificial Sequence
  Synthetic peptide
  MISC_FEATURE (2)..(2): Xaa is AIB
  MISC_FEATURE (40)..(40): Covalently bound to a C16 fatty acyl group via gamma-Glu-gamma-Glu spacer
  MISC_FEATURE (41)..(41): C-terminal amidation
HXQGTFTSEYSKYLDERAAQDFVQWLLDGGPSSGAPPPSKG

SEQ ID NO: 2017 - protein, 41 aa, Artificial Sequence
  Synthetic peptide
  MISC_FEATURE (2)..(2): Xaa is AIB
  MISC_FEATURE (40)..(40): Covalently bound to a C16 fatty acyl group via gamma-Glu-gamma-Glu spacer
  MISC_FEATURE (41)..(41): C-terminal amidation
HXQGTFTSDYAKYLDERAAQDFVQWLLDGGPSSGAPPPSKG

SEQ ID NO: 2018 - protein, 39 aa, Artificial Sequence
  Synthetic peptide
  MISC_FEATURE (2)..(2): Xaa is AIB
  MISC_FEATURE (10)..(10): Covalently bound to a C16 fatty acyl group via gamma-Glu spacer
  MISC_FEATURE (39)..(39): C-terminal amidation
HXQGTFTSDKSKYLEERAAQEFVQWLLEGGPSSGAPPPS

SEQ ID NO: 2019 - protein, 39 aa, Artificial Sequence
  Synthetic peptide
  MISC_FEATURE (2)..(2): Xaa is AIB
  MISC_FEATURE (10)..(10): Covalently bound to a C16 fatty acyl group via gamma-Glu spacer
  MISC_FEATURE (39)..(39): C-terminal amidation
HXQGTFTSDKSKYLDERAAHDFVQWLLDGGPSSGAPPPS

SEQ ID NO: 2020 - protein, 39 aa, Artificial Sequence
  Synthetic peptide
  MOD_RES (2)..(2): Xaa is AIB
  MOD_RES (10)..(10): Covalently bound to a C16 fatty acyl group via gamma-Glu spacer
  MOD_RES (39)..(39): C-terminal amidation
HXQGTFTSDKSKYLDERAAKDFVQWLLDGGPSSGAPPPS

SEQ ID NO: 2021 - protein, 39 aa, Artificial Sequence
  Synthetic peptide
  MISC_FEATURE (2)..(2): Xaa is AIB
  MISC_FEATURE (10)..(10): Covalently bound to a C16 fatty acyl group via gamma-Glu spacer
  MISC_FEATURE (20)..(20): Xaa is AIB
  MISC_FEATURE (39)..(39): C-terminal amidation
HXQGTFTSDKSKYLDERAAXEFVQWLLDGGPSSGAPPPS

SEQ ID NO: 2022 - protein, 39 aa, Artificial Sequence
  Synthetic peptide
  MISC_FEATURE (2)..(2): Xaa is AIB
  MISC_FEATURE (10)..(10): Covalently bound to a C16 fatty acyl group via gamma-Glu spacer
  MISC_FEATURE (20)..(20): Xaa is AIB
  MISC_FEATURE (39)..(39): C-terminal amidation
HXQGTFTSDKSKYLDARAAXEFVQWLLDGGPSSGAPPPS

SEQ ID NO: 2023 - protein, 39 aa, Artificial Sequence
  Synthetic peptide
  MISC_FEATURE (2)..(2): Xaa is AIB
  MISC_FEATURE (10)..(10): Covalently bound to C16 fatty acyl group via gamma-Glu spacer
  MISC_FEATURE (19)..(19): Xaa is AIB
  MISC_FEATURE (39)..(39): C-terminal amidation
HXQGTFTSDKSKYLDERAXAEFVQWLLDGGPSSGAPPPS

SEQ ID NO: 2024 - protein, 39 aa, Artificial Sequence
  Synthetic peptide
  MISC_FEATURE (2)..(2): Xaa is AIB
  MISC_FEATURE (10)..(10): Covalently bound to a C16 fatty acyl group via gamma-Glu spacer
  MISC_FEATURE (16)..(16): Xaa is AIB
  MISC_FEATURE (20)..(20): Xaa is AIB
  MISC_FEATURE (39)..(39): C-terminal amidation
HXQGTFTSDKSKYLDXRAAXEFVQWLLDGGPSSGAPPPS

SEQ ID NO: 2025 - protein, 39 aa, Artificial Sequence
  Synthetic peptide
  MISC_FEATURE (2)..(2): Xaa is AIB
  MISC_FEATURE (10)..(10): Covalently bound to a C16 fatty acyl group via gamma-Glu spacer
  MISC_FEATURE (20)..(20): Xaa is AIB
  MISC_FEATURE (39)..(39): C-terminal amidation
HXQGTFTSDKSKYLDHRAAXEFVQWLLDGGPSSGAPPPS

SEQ ID NO: 2026 - protein, 39 aa, Artificial Sequence
  Synthetic peptide
  MISC_FEATURE (2)..(2): Xaa is AIB
  MISC_FEATURE (10)..(10): Covalently bound to a C16 fatty acyl group via gamma-Glu spacer
  MISC_FEATURE (20)..(20): Xaa is AIB
  MISC_FEATURE (39)..(39): C-terminal amidation
HXQGTFTSDKSKYLDEQAAXEFVQWLLDGGPSSGAPPPS

SEQ ID NO: 2027 - protein, 39 aa, Artificial Sequence
  Synthetic peptide
  MISC_FEATURE (2)..(2): Xaa is AIB
  MISC_FEATURE (10)..(10): Covalently bound to a C16 fatty acyl group via gamma-Glu spacer
  MISC_FEATURE (19)..(19): Xaa is AIB
  MISC_FEATURE (39)..(39): C-terminal amidation
HXQGTFTSDKSKYLDERAXKEFVQWLLDGGPSSGAPPPS

SEQ ID NO: 2028 - protein, 39 aa, Artificial Sequence
  Synthetic peptide
  MISC_FEATURE (2)..(2): Xaa is AIB
  MISC_FEATURE (10)..(10): Covalently bound to a C16 fatty acyl group via gamma-Glu spacer
  MISC_FEATURE (20)..(20): Xaa is AIB
  MISC_FEATURE (39)..(39): C-terminal amidation
HXQGTFTSDKSKYLDKHAAXEFVQWLLDGGPSSGAPPPS

SEQ ID NO: 2029 - protein, 39 aa, Artificial Sequence
  Synthetic peptide
  MISC_FEATURE (2)..(2): Xaa is AIB
  MISC_FEATURE (10)..(10): Covalently bound to a C16 fatty acyl group via gamma-Glu spacer
  MISC_FEATURE (39)..(39): C-terminal amidation
HXEGTFTSDKSKYLEERAAQEFVQWLLEGGPSSGAPPPS

SEQ ID NO: 2030 - protein, 39 aa, Artificial Sequence
  Synthetic peptide
  MISC_FEATURE (2)..(2): Xaa is AIB
  MISC_FEATURE (10)..(10): Covalently bound to a C16 fatty acyl group via gamma-Glu spacer
  MISC_FEATURE (39)..(39): C-terminal amidation
HXIGTFTSDKSKYLEERAAQEFVQWLLEGGPSSGAPPPS

SEQ ID NO: 2031 - protein, 39 aa, Artificial Sequence
  Synthetic peptide
  MISC_FEATURE (2)..(2): Xaa is AIB
  MISC_FEATURE (10)..(10): Covalently bound to a C16 fatty acyl group via gamma-Glu spacer
  MISC_FEATURE (39)..(39): C-terminal amidation
HXMGTFTSDKSKYLEERAAQEFVQWLLEGGPSSGAPPPS

SEQ ID NO: 2032 - protein, 39 aa, Artificial Sequence
  Synthetic peptide
  MISC_FEATURE (2)..(2): Xaa is AIB
  MISC_FEATURE (10)..(10): Covalently bound to a C16 fatty acyl group via gamma-Glu spacer
  MISC_FEATURE (39)..(39): C-terminal amidation
HXLGTFTSDKSKYLEERAAQEFVQWLLEGGPSSGAPPPS

SEQ ID NO: 2033 - protein, 39 aa, Artificial Sequence
  Synthetic peptide
  MISC_FEATURE (2)..(2): Xaa is AIB
  MISC_FEATURE (3)..(3): Xaa is Homoserine
  MISC_FEATURE (10)..(10): Covalently bound to a C16 fatty acyl group via gamma-Glu spacer
  MISC_FEATURE (39)..(39): C-terminal amidation
HXXGTFTSDKSKYLEERAAQEFVQWLLEGGPSSGAPPPS

SEQ ID NO: 2034 - protein, 39 aa, Artificial Sequence; identical to SEQ ID NO: 2033
  Synthetic peptide
  MISC_FEATURE (2)..(2): Xaa is AIB
  MISC_FEATURE (3)..(3): Xaa is acetyl ornithine
  MISC_FEATURE (10)..(10): Covalently bound to a C16 fatty acyl group via gamma-Glu spacer
  MISC_FEATURE (39)..(39): C-terminal amidation

SEQ ID NO: 2035 - protein, 39 aa, Artificial Sequence
  Synthetic peptide
  MISC_FEATURE (2)..(2): Xaa is AIB
  MISC_FEATURE (10)..(10): Covalently bound to a C16 fatty acyl group via gamma-Glu spacer
  MISC_FEATURE (39)..(39): C-terminal amidation
HXAGTFTSDKSKYLEERAAQEFVQWLLEGGPSSGAPPPS

SEQ ID NO: 2036 - protein, 39 aa, Artificial Sequence; identical to SEQ ID NO: 2033
  Synthetic peptide
  MISC_FEATURE (2)..(2): Xaa is AIB
  MISC_FEATURE (3)..(3): Xaa is acetyl diaminobutanoic acid
  MISC_FEATURE (10)..(10): Covalently bound to a C16 fatty acyl group via gamma-Glu spacer
  MISC_FEATURE (39)..(39): C-terminal amidation

SEQ ID NO: 2037 - protein, 39 aa, Artificial Sequence
  Synthetic peptide
  MISC_FEATURE (2)..(2): Xaa is AIB
  MISC_FEATURE (10)..(10): Covalently bound to a C16 fatty acyl group via gamma-Glu spacer
  MISC_FEATURE (39)..(39): C-terminal amidation
HXVGTFTSDKSKYLEERAAQEFVQWLLEGGPSSGAPPPS

SEQ ID NO: 2038 - protein, 39 aa, Artificial Sequence; identical to SEQ ID NO: 2033
  Synthetic peptide
  MISC_FEATURE (2)..(2): Xaa is AIB
  MISC_FEATURE (3)..(3): Xaa is norvaline
  MISC_FEATURE (10)..(10): Covalently bound to a C16 fatty acyl group via gamma-Glu spacer
  MISC_FEATURE (39)..(39): C-terminal amidation

SEQ ID NO: 2039 - protein, 39 aa, Artificial Sequence; identical to SEQ ID NO: 2033
  Synthetic peptide
  MISC_FEATURE (2)..(2): Xaa is AIB
  MISC_FEATURE (3)..(3): Xaa is acetyl lysine
  MISC_FEATURE (10)..(10): Covalently bound to a C16 fatty acyl group via gamma-Glu spacer
  MISC_FEATURE (39)..(39): C-terminal amidation

SEQ ID NO: 2040 - protein, 39 aa, Artificial Sequence; identical to SEQ ID NO: 2033
  Synthetic peptide
  MISC_FEATURE (2)..(2): Xaa is AIB
  MISC_FEATURE (3)..(3): Xaa is norleucine
  MISC_FEATURE (10)..(10): Covalently bound to a C16 fatty acyl group via gamma-Glu spacer
  MISC_FEATURE (39)..(39): C-terminal amidation

SEQ ID NO: 2041 - protein, 39 aa, Artificial Sequence; identical to SEQ ID NO: 2033
  Synthetic peptide
  MISC_FEATURE (2)..(2): Xaa is AIB
  MISC_FEATURE (3)..(3): Xaa is methionine sulfone
  MISC_FEATURE (10)..(10): Covalently bound to a C16 fatty acyl group via gamma-Glu spacer
  MISC_FEATURE (39)..(39): C-terminal amidation

SEQ ID NO: 2042 - protein, 39 aa, Artificial Sequence; identical to SEQ ID NO: 2033
  Synthetic peptide
  MISC_FEATURE (2)..(2): Xaa is AIB
  MISC_FEATURE (3)..(3): Xaa is methionine sulfoxide
  MISC_FEATURE (10)..(10): Covalently bound to a C16 fatty acyl group via gamma-Glu spacer
  MISC_FEATURE (39)..(39): C-terminal amidation

SEQ ID NO: 2043 - protein, 39 aa, Artificial Sequence
  Synthetic peptide
  MISC_FEATURE (2)..(2): Xaa is AIB
  MISC_FEATURE (10)..(10): Acylated with C16 fatty acyl group via gamma-Glu spacer
  MISC_FEATURE (39)..(39): C-terminal amidation
HXQGTFTSDKSKYLDERAAQDFVQWLLEGGPSSGAPPPS

SEQ ID NO: 2044 - protein, 39 aa, Artificial Sequence
  Synthetic peptide
  MISC_FEATURE (2)..(2): Xaa is AIB
  MISC_FEATURE (10)..(10): Covalently bound to a C16 fatty acyl group via gamma-Glu spacer
  MISC_FEATURE (39)..(39): C-terminal amidation
HXEGTFTSDKSKYLDERAAQDFVQWLLEGGPSSGAPPPS

SEQ ID NO: 2045 - protein, 39 aa, Artificial Sequence
  Synthetic peptide
  MISC_FEATURE (2)..(2): Xaa is AIB
  MISC_FEATURE (10)..(10): Covalently bound to a C16 fatty acyl group via gamma-Glu spacer
  MISC_FEATURE (39)..(39): C-terminal amidation
HXVGTFTSDKSKYLDERAAQDFVQWLLEGGPSSGAPPPS

SEQ ID NO: 2046 - protein, 39 aa, Artificial Sequence
  Synthetic peptide
  MISC_FEATURE (2)..(2): Xaa is AIB
  MISC_FEATURE (3)..(3): Xaa is methionine sulfoxide
  MISC_FEATURE (10)..(10): Covalently bound to a C16 fatty acyl group via gamma-Glu spacer
  MISC_FEATURE (39)..(39): C-terminal amidation
HXXGTFTSDKSKYLDERAAQDFVQWLLEGGPSSGAPPPS

SEQ ID NO: 2047 - protein, 39 aa, Artificial Sequence; identical to SEQ ID NO: 2046
  Synthetic peptide
  MISC_FEATURE (2)..(2): Xaa is AIB
  MISC_FEATURE (3)..(3): Xaa is norvaline
  MISC_FEATURE (10)..(10): Covalently bound to a C16 fatty acyl group via gamma-Glu spacer
  MISC_FEATURE (39)..(39): C-terminal amidation

SEQ ID NO: 2048 - protein, 39 aa, Artificial Sequence; identical to SEQ ID NO: 2046
  Synthetic peptide
  MISC_FEATURE (2)..(2): Xaa is AIB
  MISC_FEATURE (3)..(3): Xaa is homoserine
  MISC_FEATURE (10)..(10): Covalently bound to a C16 fatty acyl group via gamma-Glu spacer
  MISC_FEATURE (39)..(39): C-terminal amidation

SEQ ID NO: 2049 - protein, 41 aa, Artificial Sequence
  Synthetic peptide
  MISC_FEATURE (2)..(2): Xaa is AIB
  MISC_FEATURE (40)..(40): Covalently bound to a C16 fatty acyl group via gamma-Glu-gamma-Glu spacer
  MISC_FEATURE (41)..(41): C-terminal amidation
HXQGTFTSDYSKYLDERAAQDFVQWALDGGPSSGAPPPSKG

SEQ ID NO: 2050 - protein, 41 aa, Artificial Sequence
  Synthetic peptide
  MISC_FEATURE (2)..(2): Xaa is AIB
  MISC_FEATURE (40)..(40): Covalently bound to a C16 fatty acyl group via gamma-Glu-gamma-Glu spacer
  MISC_FEATURE (41)..(41): C-terminal amidation
HXQGTFTSDYSKYLDERAAQDFVQWLADGGPSSGAPPPSKG

SEQ ID NO: 2051 - protein, 41 aa, Artificial Sequence
  Synthetic peptide
  MISC_FEATURE (2)..(2): Xaa is AIB
  MISC_FEATURE (40)..(40): Covalently bound to a C16 fatty acyl group via gamma-Glu-gamma-Glu spacer
  MISC_FEATURE (41)..(41): C-terminal amidation
HXQGTFTSDYSKYLDERAAQDFVQWLLAGGPSSGAPPPSKG

SEQ ID NO: 2052 - protein, 41 aa, Artificial Sequence
  Synthetic peptide
  MISC_FEATURE (2)..(2): Xaa is AIB
  MISC_FEATURE (40)..(40): Covalently bound to a C16 fatty acyl group via gamma-Glu-gamma-Glu spacer
  MISC_FEATURE (41)..(41): C-terminal amidation
HXQGTFTSDYSKYLDERAAQDFVQWLLDAGPSSGAPPPSKG

SEQ ID NO: 2053 - protein, 41 aa, Artificial Sequence
  Synthetic peptide
  MISC_FEATURE (2)..(2): Xaa is AIB
  MISC_FEATURE (40)..(40): Covalently bound to a C16 fatty acyl group via gamma-Glu-gamma-Glu spacer
  MISC_FEATURE (41)..(41): C-terminal amidation
HXQGTFTSDYSKYLDERAAQDFVQWLLDGAPSSGAPPPSKG

SEQ ID NO: 2054 - protein, 41 aa, Artificial Sequence
  Synthetic peptide
  MISC_FEATURE (2)..(2): Xaa is AIB
  MISC_FEATURE (40)..(40): Covalently bound to a C16 fatty acyl group via gamma-Glu-gamma-Glu spacer
  MISC_FEATURE (41)..(41): C-terminal amidation
HXQGTFTSDYSKYLDERAAQDFVQWLLDGGASSGAPPPSKG

SEQ ID NO: 2055 - protein, 41 aa, Artificial Sequence
  Synthetic peptide
  MISC_FEATURE (2)..(2): Xaa is AIB
  MISC_FEATURE (40)..(40): Covalently bound to a C16 fatty acyl group via gamma-Glu-gamma-Glu spacer
  MISC_FEATURE (41)..(41): C-terminal amidation
HXQGTFTSDYSKYLDERAAQDFVQWLLDGGPASGAPPPSKG

SEQ ID NO: 2056 - protein, 41 aa, Artificial Sequence
  Synthetic peptide
  MISC_FEATURE (2)..(2): Xaa is AIB
  MISC_FEATURE (40)..(40): Covalently bound to a C16 fatty acyl group via gamma-Glu-gamma-Glu spacer
  MISC_FEATURE (41)..(41): C-terminal amidation
HXQGTFTSDYSKYLDERAAQDFVQWLLDGGPSAGAPPPSKG

SEQ ID NO: 2057 - protein, 41 aa, Artificial Sequence
  Synthetic peptide
  MISC_FEATURE (2)..(2): Xaa is AIB
  MISC_FEATURE (40)..(40): Covalently bound to a C16 fatty acyl group via gamma-Glu-gamma-Glu spacer
  MISC_FEATURE (41)..(41): C-terminal amidation
HXQGTFTSDYSKYLDERAAQDFVQWLLDGGPSSAAPPPSKG

SEQ ID NO: 2058 - protein, 41 aa, Artificial Sequence
  Synthetic peptide
  MISC_FEATURE (2)..(2): Xaa is AIB
  MISC_FEATURE (40)..(40): Covalently bound to a C16 fatty acyl group via gamma-Glu-gamma-Glu spacer
  MISC_FEATURE (41)..(41): C-terminal amidation
HXQGTFTSDYSKYLDERAAQDFVQWLLDGGPSSGAAPPSKG

SEQ ID NO: 2059 - protein, 41 aa, Artificial Sequence
  Synthetic peptide
  MISC_FEATURE (2)..(2): Xaa is AIB
  MISC_FEATURE (40)..(40): Covalently bound to a C16 fatty acyl group via gamma-Glu-gamma-Glu spacer
  MISC_FEATURE (41)..(41): C-terminal amidation
HXQGTFTSDYSKYLDERAAQDFVQWLLDGGPSSGAPAPSKG

SEQ ID NO: 2060 - protein, 41 aa, Artificial Sequence
  Synthetic peptide
  MISC_FEATURE (2)..(2): Xaa is AIB
  MISC_FEATURE (40)..(40): Covalently bound to a C16 fatty acyl group via gamma-Glu-gamma-Glu spacer
  MISC_FEATURE (41)..(41): C-terminal amidation
HXQGTFTSDYSKYLDERAAQDFVQWLLDGGPSSGAPPASKG

SEQ ID NO: 2061 - protein, 41 aa, Artificial Sequence
  Synthetic peptide
  MISC_FEATURE (2)..(2): Xaa is AIB
  MISC_FEATURE (40)..(40): Covalently bound to a C16 fatty acyl group via gamma-Glu-gamma-Glu spacer
  MISC_FEATURE (41)..(41): C-terminal amidation
HXQGTFTSDYSKYLDERAAQDFVQWLLDGGPSSGAPPPAKG

SEQ ID NO: 2062 - protein, 41 aa, Artificial Sequence; identical to SEQ ID NO: 2011
  Synthetic peptide
  MISC_FEATURE (2)..(2): Xaa is AIB
  MISC_FEATURE (41)..(41): C-terminal amidation

SEQ ID NO: 2063 - protein, 39 aa, Artificial Sequence
  Synthetic peptide
  MISC_FEATURE (2)..(2): Xaa is AIB
  MISC_FEATURE (10)..(10): Covalently bound to a C16 fatty acyl group via gamma-Glu spacer
  MISC_FEATURE (39)..(39): C-terminal amidation
HXQGTFTSDKSKYLDERAAQDFVQWLLDVGPSSGAPPPS

SEQ ID NO: 2064 - protein, 39 aa, Artificial Sequence
  Synthetic peptide
  MISC_FEATURE (2)..(2): Xaa is AIB
  MISC_FEATURE (10)..(10): Covalently bound to a C16 fatty acyl group via gamma-Glu spacer
  MISC_FEATURE (39)..(39): C-terminal amidation
HXQGTFTSDKSKYLDERAAQDFVQWLLDAGPSSGAPPPS

SEQ ID NO: 2065 - protein, 39 aa, Artificial Sequence
  Synthetic peptide
  MISC_FEATURE (2)..(2): Xaa is AIB
  MISC_FEATURE (10)..(10): Covalently bound to a C16 fatty acyl group via gamma-Glu spacer
  MISC_FEATURE (29)..(29): Xaa is AIB
  MISC_FEATURE (39)..(39): C-terminal amidation
HXQGTFTSDKSKYLDERAAQDFVQWLLDXGPSSGAPPPS

SEQ ID NO: 2066 - protein, 39 aa, Artificial Sequence
  Synthetic peptide
  MISC_FEATURE (2)..(2): Xaa is AIB
  MISC_FEATURE (3)..(3): Xaa is Gln or Gln analog
  MISC_FEATURE (10)..(10): Xaa is Tyr or an amino acid covalently attached to a C12 to C18 acyl or alkyl group
  MISC_FEATURE (15)..(15): Xaa is an acidic amino acid, optionally, Glu or Asp
  MISC_FEATURE (16)..(16): Xaa is any amino acid, optionally, any amino acid other than Gly, Pro, and Ser; e.g., Glu, Ala, alpha, alpha-disubstituted amino acid (e.g., AIB), His, Lys or Glu
  MISC_FEATURE (17)..(17): Xaa is Arg, His, Gln
  MISC_FEATURE (18)..(18): Xaa is Arg or Ala
  MISC_FEATURE (19)..(19): Xaa is Ala or alpha, alpha disubstituted amino acid
  MISC_FEATURE (20)..(20): Xaa is selected from group consisting of: alpha, alpha-disubstituted amino acid (e.g., AIB) or Gln or His, Lys, or Ala
  MISC_FEATURE (21)..(21): Xaa is an acidic amino acid, optionally, Asp or Glu
  MISC_FEATURE (27)..(27): Xaa is Leu, Ala, Nle, or Met
  MISC_FEATURE (28)..(28): Xaa is Ala or an acidic amino acid (optionally, Asp or Glu)
  MISC_FEATURE (29)..(29): Xaa is aliphatic, e.g., Ala or Gly or AIB or Val
  MISC_FEATURE (30)..(30): Xaa is a small aliphatic amino acid, e.g., Ala or Gly
  MISC_FEATURE (35)..(35): Xaa is Ala or a basic amino acid (optionally, Arg or Lys)
HXXGTFTSDXSKYLXXXXXXXFVQWLXXXXPSSGXPPPS

SEQ ID NO: 2067 - protein, 39 aa, Artificial Sequence; identical to SEQ ID NO: 2066
  Synthetic peptide
  MISC_FEATURE (1)..(1): Xaa is an amino acid comprising a side chain imidazole, optionally, a His or His derivative
  MISC_FEATURE (2)..(2): Xaa is a DPP-IV protetive amino acid, optionally, an alpha, alpha-disubstituted amino acid (e.g., AIB)
  MISC_FEATURE (3)..(3): Xaa is selected from the group consisting of Glu, Ala, Leu, Ile, Nle, Val, NorVal, homoserine, Met, methionine sulfoxide, methionine sulfone, acetyl-Orn, acetyl-diaminobutanoic acid, acetyl-Lys
  MISC_FEATURE (10)..(10): Xaa is an amino acid covalently attached to a C12 to C18 acyl or alkyl group
  MISC_FEATURE (15)..(15): Xaa is an acidic amino acid, optionally, Glu or Asp
  MISC_FEATURE (16)..(16): Xaa is any amino acid, optionally, any amino acid other than Gly, Pro, and Ser; (e.g., Glu, Ala, alpha, alpha-disubstituted amino acid (e.g., AIB), His, Lys)
  MISC_FEATURE (17)..(17): Xaa is Arg, His, Gln
  MISC_FEATURE (18)..(18): Xaa is Arg or Ala
  MISC_FEATURE (19)..(19): Xaa is Ala or alpha, alpha disubstituted amino acid
  MISC_FEATURE (20)..(20): Xaa is selected from group consisting of: alpha, alpha-disubstituted amino acid (e.g., AIB) or Gln or His, Lys, or Ala
  MISC_FEATURE (21)..(21): Xaa is an acidic amino acid, optionally, Asp or Glu
  MISC_FEATURE (27)..(27): Xaa is Leu, Ala, Nle, or Met
  MISC_FEATURE (28)..(28): Xaa is Ala or an acidic amino acid (optionally, Asp or Glu)
  MISC_FEATURE (29)..(29): Xaa is aliphatic, e.g., Ala or Gly or AIB or Val
  MISC_FEATURE (30)..(30): Xaa is a small aliphatic amino acid, e.g., Ala or Gly
  MISC_FEATURE (35)..(35): Xaa is Ala or a basic amino acid (optionally, Arg or Lys)

SEQ ID NO: 2068 - protein, 10 aa, Artificial Sequence
  Synthetic peptide
GPSSGRPPPS

SEQ ID NO: 2069 - protein, 39 aa, Artificial Sequence
  Synthetic peptide
  MISC_FEATURE (2)..(2): Xaa is AIB
  MISC_FEATURE (3)..(3): Xaa is Gln or Gln analog
  MISC_FEATURE (10)..(10): Covalently bound to a C16 fatty acyl group via gamma-Glu spacer
  MISC_FEATURE (15)..(15): Xaa is Glu or Asp
  MISC_FEATURE (21)..(21): Xaa is Glu or Asp
  MISC_FEATURE (28)..(28): Xaa is Glu or Asp
  MISC_FEATURE (39)..(39): C-terminal amidation
HXXGTFTSDKSKYLXERRAQXFVQWLLXGGPSSGAPPPS

SEQ ID NO: 2070 - protein, 39 aa, Artificial Sequence; identical to SEQ ID NO: 2069
  Synthetic peptide
  MISC_FEATURE (2)..(2): Xaa is AIB
  MISC_FEATURE (3)..(3): Xaa is Glu, Ala, Leu, Ile, Nle, Val, NorVal, homoserine, Met, methionine sulfoxide, methionine sulfone, acetyl-Orn, acetyl-diaminobutanoic acid, acetyl-Lys
  MISC_FEATURE (10)..(10): Covalently bound to a C16 fatty acyl group via gamma-Glu spacer
  MISC_FEATURE (15)..(15): Xaa is Glu or Asp
  MISC_FEATURE (21)..(21): Xaa is Glu or Asp
  MISC_FEATURE (28)..(28): Xaa is Glu or Asp
  MISC_FEATURE (39)..(39): C-terminal amidation

SEQ ID NO: 2071 - protein, 39 aa, Artificial Sequence; identical to SEQ ID NO: 2066
  Synthetic peptide
  MISC_FEATURE (2)..(2): Xaa is AIB
  MISC_FEATURE (3)..(3): Xaa is acidic amino acid, basic amino acid, or hydrophobic amino acid, optionally, Glu, Nle, or Orn
  MISC_FEATURE (10)..(10): Xaa is Tyr or an amino acid covalently attached to a C12 to C18 acyl or alkyl group
  MISC_FEATURE (15)..(15): Xaa is an acidic amino acid, optionally, Glu or Asp
  MISC_FEATURE (16)..(16): Xaa is any amino acid, optionally, any amino acid other than Gly, Pro, and Ser; e.g., Glu, Ala, alpha, alpha-disubstituted amino acid (e.g., AIB), His, Lys or Glu
  MISC_FEATURE (17)..(17): Xaa is Arg, His, Gln
  MISC_FEATURE (18)..(18): Xaa is Arg or Ala
  MISC_FEATURE (19)..(19): Xaa is Ala or alpha, alpha disubstituted amino acid
  MISC_FEATURE (20)..(20): Xaa is selected from group consisting of: alpha, alpha-disubstituted amino acid (e.g., AIB) or Gln or His, Lys, or Ala
  MISC_FEATURE (21)..(21): Xaa is an acidic amino acid, optionally, Asp or Glu
  MISC_FEATURE (27)..(27): Xaa is Leu, Ala, Nle, or Met
  MISC_FEATURE (28)..(28): Xaa is Ala or an acidic amino acid (optionally, Asp or Glu)
  MISC_FEATURE (29)..(29): Xaa is aliphatic, e.g., Ala or Gly or AIB or Val
  MISC_FEATURE (30)..(30): Xaa is a small aliphatic amino acid, e.g., Ala or Gly
  MISC_FEATURE (35)..(35): Xaa is Ala or a basic amino acid (optionally, Arg or Lys)

SEQ ID NO: 2072 - protein, 39 aa, Artificial Sequence; identical to SEQ ID NO: 2069
  Synthetic peptide
  MISC_FEATURE (2)..(2): Xaa is AIB
  MISC_FEATURE (3)..(3): Xaa is acidic amino acid, basic amino acid, or hydrophobic amino acid, optionally, Glu, Nle, or Orn
  MISC_FEATURE (10)..(10): Covalently bound to a C16 fatty acyl group via gamma-Glu spacer
  MISC_FEATURE (15)..(15): Xaa is Glu or Asp
  MISC_FEATURE (21)..(21): Xaa is Glu or Asp
  MISC_FEATURE (28)..(28): Xaa is Glu or Asp
  MISC_FEATURE (39)..(39): C-terminal amidation

SEQ ID NO: 2073-2099 - skipped (27 entries)

SEQ ID NO: 2100 - protein, 39 aa, Artificial Sequence
  Synthetic peptide
  MISC_FEATURE: Analog #29
  MISC_FEATURE (2)..(2): d-Ser
  MISC_FEATURE (10)..(10): Covalently bound to a C12-C18 fatty acyl group via acidic amino acid spacer
  MISC_FEATURE (39)..(39): C-terminal amidation
HSQGTFTSDKSKYLDERAAQDFVQWLLDGGPSSGAPPPS

SEQ ID NO: 2101 - protein, 39 aa, Artificial Sequence; identical to SEQ ID NO: 2010
  Synthetic peptide
  MISC_FEATURE: Analog #30
  MISC_FEATURE (2)..(2): Xaa is AIB
  MISC_FEATURE (10)..(10): Covalently bound to a C12-C18 fatty acyl group via acidic amino acid spacer
  MISC_FEATURE (39)..(39): C-terminal amidation

SEQ ID NO: 2102 - protein, 31 aa, Artificial Sequence
  Synthetic peptide
  MISC_FEATURE: Analog #34
  MISC_FEATURE (2)..(2): Xaa is AIB
  MISC_FEATURE (10)..(10): Covalently bound to a C12-C18 fatty acyl group via acidic amino acid spacer
  MISC_FEATURE (31)..(31): C-terminal amidation
HXQGTFTSDKSKYLDERAAQDFVQWLLDGRG

SEQ ID NO: 2103 - protein, 29 aa, Artificial Sequence
  Synthetic peptide
  MISC_FEATURE: Analog #36
  MISC_FEATURE (2)..(2): d-Ser
  MISC_FEATURE (10)..(10): Covalently bound to a C12-C18 fatty acyl group via acidic amino acid spacer
  MISC_FEATURE (20)..(20): Xaa is AIB
  MISC_FEATURE (29)..(29): C-terminal amidation
HSQGTFTSDKSKYLDERRAXEFVQWLLDT

SEQ ID NO: 2104 - protein, 29 aa, Artificial Sequence
  Synthetic peptide
  MISC_FEATURE: Analog #37
  MISC_FEATURE (2)..(2): Xaa is AIB
  MISC_FEATURE (10)..(10): Covalently bound to a C12-C18 fatty acyl group via acidic amino acid spacer
  MISC_FEATURE (20)..(20): Xaa is AIB
  MISC_FEATURE (29)..(29): C-terminal amidation
HXQGTFTSDKSKYLDERRAXEFVQWLLDT

SEQ ID NO: 2105 - protein, 29 aa, Artificial Sequence
  Synthetic peptide
  MISC_FEATURE: Analog #44
  MISC_FEATURE (1)..(1): Xaa is alpha-dimethyl imidiazole acetic acid (DMIA)
  MISC_FEATURE (2)..(2): d-Ser
  MISC_FEATURE (10)..(10): Covalently bound to a C12-C18 fatty acyl group via acidic amino acid spacer
  MISC_FEATURE (29)..(29): C-terminal amidation
XSQGTFTSDKSKYLDERAAQDFVQWLLDT

SEQ ID NO: 2106 - protein, 39 aa, Artificial Sequence
  Synthetic peptide
  MISC_FEATURE: Analog #49
  MISC_FEATURE (2)..(2): Xaa is AIB
  MISC_FEATURE (10)..(10): Covalently bound to a C12-C18 fatty acyl group via dipeptide spacer
  MISC_FEATURE (16)..(16): Xaa is AIB
  MISC_FEATURE (39)..(39): C-terminal amidation
HXQGTFTSDKSKYLDXRAAQDFVQWLMDGGPSSGAPPPS

SEQ ID NO: 2107 - protein, 39 aa, Artificial Sequence
  Synthetic peptide
  MISC_FEATURE: Analog #53
  MISC_FEATURE (2)..(2): Xaa is AIB
  MISC_FEATURE (10)..(10): Covalently bound to a C12-C18 fatty acyl group via dipeptide acid spacer
  MISC_FEATURE (16)..(16): Xaa is AIB
  MISC_FEATURE (39)..(39): C-terminal amidation
HXQGTFTSDKSKYLDXRAAQDFVQWLVKGGPSSGAPPPS

SEQ ID NO: 2108 - protein, 39 aa, Artificial Sequence
  Synthetic peptide
  MISC_FEATURE: Analog #54
  MISC_FEATURE (2)..(2): Xaa can be any naturally occurring amino acid
  MISC_FEATURE (10)..(10): Covalently bound to a C12-C18 fatty acyl group via dipeptide acid spacer
  MISC_FEATURE (16)..(16): Xaa is AIB
  MISC_FEATURE (39)..(39): C-terminal amidation
HXQGTFTSDKSKYLDXRAAQDFVQWLKDGGPSSGAPPPS

SEQ ID NO: 2109 - protein, 39 aa, Artificial Sequence
  Synthetic peptide
  MISC_FEATURE: Analog #61
  MISC_FEATURE (2)..(2): Xaa is AIB
  MISC_FEATURE (10)..(10): Covalently bound to a C12-C18 fatty acyl group via acidic amino acid spacer
  MISC_FEATURE (20)..(20): Xaa is AIB
  MISC_FEATURE (39)..(39): C-terminal amidation
HXQGTFTSDKSKYLDERRAXEFVQWLLDGGPSSGAPPPS

SEQ ID NO: 2110 - protein, 39 aa, Artificial Sequence
  Synthetic peptide
  MISC_FEATURE: Analog #62
  MISC_FEATURE (2)..(2): Xaa is AIB
  MISC_FEATURE (10)..(10): Covalently bound to a C12-C18 fatty acyl group via acidic amino acid spacer
  MISC_FEATURE (20)..(20): Xaa is AIB
  MISC_FEATURE (39)..(39): C-terminal amidation
HXEGTFTSDKSKYLDERRAXEFVQWLLDGGPSSGAPPPS

SEQ ID NO: 2111 - protein, 39 aa, Artificial Sequence; identical to SEQ ID NO: 2012
  Synthetic peptide
  MISC_FEATURE: Analog #63
  MISC_FEATURE (2)..(2): Xaa is AIB
  MISC_FEATURE (10)..(10): Covalently bound to a C12-C18 fatty acyl group via acidic amino acid spacer
  MISC_FEATURE (39)..(39): C-terminal amidation

SEQ ID NO: 2112 - protein, 29 aa, Artificial Sequence
  Synthetic peptide
  MISC_FEATURE: Analog #64
  MISC_FEATURE (2)..(2): Xaa is AIB
  MISC_FEATURE (10)..(10): Covalently bound to a C12-C18 fatty acyl group via acidic amino acid spacer
  MISC_FEATURE (20)..(20): Xaa is AIB
  MISC_FEATURE (29)..(29): C-terminal amidation
HXEGTFTSDKSKYLDERRAXEFVQWLLDT

SEQ ID NO: 2113 - protein, 39 aa, Artificial Sequence
  Synthetic peptide
  MISC_FEATURE: Analog #65
  MISC_FEATURE (2)..(2): Xaa is AIB
  MISC_FEATURE (10)..(10): Covalently bound to a C12-C18 fatty acyl group via acidic amino acid spacer
  MISC_FEATURE (20)..(20): Xaa is AIB
  MISC_FEATURE (39)..(39): C-terminal amidation
HXEGTFTSDKSKYLDERRAXDFVQWLLDGGPSSGAPPPS

SEQ ID NO: 2114 - protein, 29 aa, Artificial Sequence
  Synthetic peptide
  MISC_FEATURE (2)..(2): Xaa is AIB
  MISC_FEATURE (9)..(9): Covalently bound to a C12-C18 fatty acyl group via dipeptide spacer
  MISC_FEATURE (16)..(16): Xaa is AIB
  MISC_FEATURE (29)..(29): C-terminal amidation
HXQGTFTSKYSKYLDXRRAQDFVQWLMNT

SEQ ID NO: 2115 - protein, 29 aa, Artificial Sequence
  Synthetic peptide
  MISC_FEATURE (2)..(2): Xaa is AIB
  MISC_FEATURE (10)..(10): Covalently bound to a C12-C18 fatty acyl group via dipeptide spacer
  MISC_FEATURE (16)..(16): Xaa is AIB
  MISC_FEATURE (29)..(29): C-terminal amidation
HXQGTFTSDKSKYLDXRRAQDFVQWLMNT

SEQ ID NO: 2116 - protein, 29 aa, Artificial Sequence
  Synthetic peptide
  MISC_FEATURE (2)..(2): Xaa is AIB
  MISC_FEATURE (12)..(12): Covalently bound to a C12-C18 fatty acyl group via dipeptide spacer
  MISC_FEATURE (16)..(16): Xaa is AIB
  MISC_FEATURE (29)..(29): C-terminal amidation
HXQGTFTSDYSKYLDXRRAQDFVQWLMNT

SEQ ID NO: 2117 - protein, 29 aa, Artificial Sequence
  Synthetic peptide
  MISC_FEATURE (2)..(2): Xaa is AIB
  MISC_FEATURE (16)..(16): Covalently bound to a C12-C18 fatty acyl group via dipeptide spacer
  MISC_FEATURE (29)..(29): C-terminal amidation
HXQGTFTSDYSKYLDKRRAQDFVQWLMNT

SEQ ID NO: 2118 - protein, 29 aa, Artificial Sequence
  Synthetic peptide
  MISC_FEATURE (2)..(2): Xaa is AIB
  MISC_FEATURE (16)..(16): Xaa is AIB
  MISC_FEATURE (20)..(20): Covalently bound to a C12-C18 fatty acyl group via dipeptide spacer
  MISC_FEATURE (29)..(29): C-terminal amidation
HXQGTFTSDYSKYLDXRRAKDFVQWLMNT

SEQ ID NO: 2119 - protein, 39 aa, Artificial Sequence
  Synthetic peptide
  MISC_FEATURE (2)..(2): Xaa is AIB
  MISC_FEATURE (10)..(10): Covalently bound to a C12-C18 fatty acyl group via acidic amino acid spacer
  MISC_FEATURE (20)..(20): Xaa is AIB
  MISC_FEATURE (39)..(39): C-terminal amidation
YXQGTFTSDKSIYLDKQAAXEFVNWLLAGGPSSGAPPPS

SEQ ID NO: 2120 - protein, 40 aa, Artificial Sequence
  Synthetic peptide
  MISC_FEATURE (2)..(2): Xaa is AIB
  MISC_FEATURE (10)..(10): Covalently bound to a C12-C18 fatty acyl group via acidic amino acid spacer
  MISC_FEATURE (20)..(20): Xaa is AIB
  MISC_FEATURE (40)..(40): Covalently bound to PEG
  MISC_FEATURE (40)..(40): C-terminal amidation
YXQGTFTSDKSIYLDKQAAXEFVNWLLAGGPSSGAPPPSC

SEQ ID NO: 2121 - protein, 41 aa, Artificial Sequence
  Synthetic peptide
  MISC_FEATURE (2)..(2): Xaa is AIB
  MISC_FEATURE (20)..(20): Xaa is AIB
  MISC_FEATURE (40)..(40): Covalently bound to a C12-C18 fatty acyl group via acidic amino acid spacer
  MISC_FEATURE (41)..(41): C-terminal amidation
YXQGTFTSDYSIYLDKQAAXEFVNWLLAGGPSSGAPPPSKG

SEQ ID NO: 2122 - protein, 41 aa, Artificial Sequence
  Synthetic peptide
  MISC_FEATURE (2)..(2): Xaa is AIB
  MISC_FEATURE (20)..(20): Xaa is AIB
  MISC_FEATURE (40)..(40): Covalently bound to a C12-C18 fatty acyl group via acidic amino acid spacer
  MISC_FEATURE (41)..(41): Covalently bound to a PEG
  MISC_FEATURE (41)..(41): C-terminal amidation
YXQGTFTSDYSIYLDKQAAXEFVNWLLAGGPSSGAPPPSKC

SEQ ID NO: 2123 - protein, 40 aa, Artificial Sequence; identical to SEQ ID NO: 2120
  Synthetic peptide
  MISC_FEATURE (2)..(2): Xaa is AIB
  MISC_FEATURE (10)..(10): Covalently bound to a C12-C18 fatty acyl group via acidic amino acid spacer
  MISC_FEATURE (20)..(20): Xaa is AIB
  MISC_FEATURE (40)..(40): Covalently bound to PEG
  MISC_FEATURE (40)..(40): C-terminal amidation

SEQ ID NO: 2124 - protein, 40 aa, Artificial Sequence; identical to SEQ ID NO: 2120
  Synthetic peptide
  MISC_FEATURE (2)..(2): Xaa is AIB
  MISC_FEATURE (10)..(10): Covalently bound to a C12-C18 fatty acyl group via acidic amino acid spacer
  MISC_FEATURE (20)..(20): Xaa is AIB
  MISC_FEATURE (40)..(40): Covalently bound to PEG
  MISC_FEATURE (40)..(40): C-terminal amidation

SEQ ID NO: 2125 - protein, 40 aa, Artificial Sequence; identical to SEQ ID NO: 766
  Synthetic peptide
  MISC_FEATURE (2)..(2): Xaa is AIB
  MISC_FEATURE (20)..(20): Xaa is AIB
  MISC_FEATURE (24)..(24): Covalently bound to PEG
  MISC_FEATURE (40)..(40): Covalently bound to a C12-C18 fatty acyl group
  MISC_FEATURE (40)..(40): C-terminal amidation

SEQ ID NO: 2126 - protein, 31 aa, Artificial Sequence
  Synthetic peptide
  MISC_FEATURE (2)..(2): Xaa is AIB
  MISC_FEATURE (10)..(10): Covalently bound to a C12-C18 fatty acyl group via acidic amino acid spacer
  MISC_FEATURE (20)..(20): Xaa is AIB
  MISC_FEATURE (31)..(31): C-terminal amidation
HXQGTFTSDKSKYLDERRAXEFVQWLLDGRG

SEQ ID NO: 2127 - protein, 31 aa, Artificial Sequence
  Synthetic peptide
  MISC_FEATURE (2)..(2): d-Ser
  MISC_FEATURE (10)..(10): Covalently bound to a C12-C18 fatty acyl group via acidic amino acid spacer
  MISC_FEATURE (20)..(20): Xaa is AIB
  MISC_FEATURE (31)..(31): C-terminal amiation
HSQGTFTSDKSKYLDERRAXEFVQWLLDGRG

SEQ ID NO: 2128 - protein, 39 aa, Artificial Sequence
  Synthetic peptide
  MISC_FEATURE (2)..(2): d-Ser
  MISC_FEATURE (10)..(10): Covalently bound to a C12-C18 fatty acyl group via acidic amino acid spacer
  MISC_FEATURE (20)..(20): Xaa is AIB
  MISC_FEATURE (39)..(39): C-terminal amidation
HSQGTFTSDKSKYLDERRAXEFVQWLLDGGPSSGAPPPS

SEQ ID NO: 2129 - protein, 39 aa, Artificial Sequence; identical to SEQ ID NO: 2109
  Synthetic peptid
  MISC_FEATURE (2)..(2): Xaa is AIB
  MISC_FEATURE (10)..(10): Covalently bound to a C12-C18 fatty acyl group via acidic amino acid spacer
  MISC_FEATURE (20)..(20): Xaa is AIB
  MISC_FEATURE (39)..(39): C-terminal amidation

SEQ ID NO: 2130 - protein, 39 aa, Artificial Sequence; identical to SEQ ID NO: 2012
  Synthetic peptide
  MISC_FEATURE (2)..(2): Xaa is AIB
  MISC_FEATURE (10)..(10): Covalently bound to a C12-C18 fatty acyl group via acidic amino acid spacer
  MISC_FEATURE (39)..(39): C-terminal amidation

SEQ ID NO: 2131 - protein, 39 aa, Artificial Sequence; identical to SEQ ID NO: 2119
  Synthetic peptide
  MISC_FEATURE (2)..(2): Xaa is AIB
  MISC_FEATURE (10)..(10): Covalently bound to a C12-C18 fatty acyl group via dipeptide spacer
  MISC_FEATURE (20)..(20): Xaa is AIB
  MISC_FEATURE (39)..(39): C-terminal amidation

SEQ ID NO: 2132 - protein, 39 aa, Artificial Sequence; identical to SEQ ID NO: 758
  Synthetic peptide
  MISC_FEATURE (2)..(2): Xaa is AIB
  MISC_FEATURE (10)..(10): Covalently bound to a C12-C18 fatty acyl group via dipeptide spacer
  MISC_FEATURE (20)..(20): Xaa is AIB
  MISC_FEATURE (39)..(39): C-terminal amidation

SEQ ID NO: 2133 - protein, 39 aa, Artificial Sequence
  Synthetic peptide
  MISC_FEATURE (2)..(2): Xaa is AIB
  MISC_FEATURE (10)..(10): Covalently bound to a C12-C18 fatty acyl group via acidic amino acid spacer
  MISC_FEATURE (20)..(20): Xaa is AIB
  MISC_FEATURE (39)..(39): C-terminal amidation
HXQGTFTSDKSKYLDERRAXDFVQWLLDGGPSSGAPPPS

SEQ ID NO: 2134 - protein, 39 aa, Artificial Sequence; identical to SEQ ID NO: 2113
  Synthetic peptide
  MISC_FEATURE (2)..(2): Xaa is AIB
  MISC_FEATURE (10)..(10): Covalently bound to a C12-C18 fatty acyl group via acidic amino acid spacer
  MISC_FEATURE (20)..(20): Xaa is AIB
  MISC_FEATURE (39)..(39): C-terminal amidation

SEQ ID NO: 2135 - protein, 29 aa, Artificial Sequence
  Synthetic peptid
  MISC_FEATURE (2)..(2): Xaa is AIB
  MISC_FEATURE (10)..(10): Covalently bound to a C12-C18 fatty acyl group via acidic amino acid spacer
  MISC_FEATURE (20)..(20): Xaa is AIB
  MISC_FEATURE (29)..(29): C-terminal amidation
HXEGTFTSDKSKYLDERRAXEFVQWLLDT

SEQ ID NO: 2136 - protein, 40 aa, Artificial Sequence
  Synthetic peptide
  MISC_FEATURE (2)..(2): Xaa is AIB
  MISC_FEATURE (40)..(40): Covalently bound to a C12-C18 fatty acyl group
  MISC_FEATURE (40)..(40): C-terminal amidation
HXEGTFISDYSKYLDEQAAKEFIAWLMNGGPSSGAPPPSK

SEQ ID NO: 2137 - protein, 40 aa, Artificial Sequence
  Synthetic peptide
  MISC_FEATURE (2)..(2): Xaa is AIB
  MISC_FEATURE (20)..(20): Xaa is AIB
  MISC_FEATURE (40)..(40): Covalently bound to a C12-C18 fatty acyl group
  MISC_FEATURE (40)..(40): C-terminal amidation
HXQGTFTSDYSKYLDERRAXEFVNWLLAGGPSSGAPPPSK

SEQ ID NO: 2138 - protein, 40 aa, Artificial Sequence
  Synthetic peptide
  MISC_FEATURE (2)..(2): Xaa is AIB
  MISC_FEATURE (20)..(20): Xaa is AIB
  MISC_FEATURE (40)..(40): Covalently bound to a C12-C18 fatty acyl group
  MISC_FEATURE (40)..(40): C-terminal amidation
YXQGTFTSDYSKYLDERRAXEFVNWLLAGGPSSGAPPPSK

SEQ ID NO: 2139 - protein, 41 aa, Artificial Sequence; identical to SEQ ID NO: 2011
  Synthetic peptide
  MISC_FEATURE (2)..(2): Xaa is AIB
  MISC_FEATURE (40)..(40): Covalently bound to a C12-C18 fatty acyl group via dipeptide spacer
  MISC_FEATURE (41)..(41): C-terminal amidation

SEQ ID NO: 2140 - protein, 39 aa, Artificial Sequence; identical to SEQ ID NO: 2010
  Synthetic peptide
  MISC_FEATURE (2)..(2): Xaa is AIB
  MISC_FEATURE (10)..(10): Covalently bound to a C12-C18 fatty acyl group via dipeptide spacer
  MISC_FEATURE (39)..(39): C-terminal amidation

SEQ ID NO: 2141 - protein, 39 aa, Artificial Sequence
  Synthetic peptide
  MISC_FEATURE (2)..(2): Xaa is AIB
  MISC_FEATURE (10)..(10): Covalently bound to a C12-C18 fatty acyl group via dipeptide spacer
  MISC_FEATURE (20)..(20): Xaa is AIB
  MISC_FEATURE (39)..(39): C-terminal amidation
YXQGTFTSDKSIYLDKQAAXEFVNWLLDGGPSSGAPPPS

SEQ ID NO: 2142 - protein, 29 aa, Artificial Sequence
  Synthetic peptide
  MISC_FEATURE (2)..(2): Xaa is AIB
  MISC_FEATURE (10)..(10): Covalently bound to a C12-C18 fatty acyl group via dipeptide spacer
  MISC_FEATURE (20)..(20): Xaa is AIB
  MISC_FEATURE (29)..(29): C-terminal amidation
YXQGTFTSDKSIYLDKQAAXEFVNWLLDT

SEQ ID NO: 2143 - protein, 39 aa, Artificial Sequence; identical to SEQ ID NO: 2100
  Synthetic peptide
  MISC_FEATURE: Analog #29
  MISC_FEATURE (2)..(2): d-Ser
  MISC_FEATURE (10)..(10): Acylated with a C12-C18 fatty acyl group via acid amino acid spacer
  MISC_FEATURE (39)..(39): C-terminal amidation

SEQ ID NO: 2144 - protein, 39 aa, Artificial Sequence; identical to SEQ ID NO: 2010
  Synthetic peptide
  MISC_FEATURE: Analog #30
  MISC_FEATURE (2)..(2): Xaa is AIB
  MISC_FEATURE (10)..(10): Acylated with a C12-C18 fatty acyl group via acid amino acid spacer
  MISC_FEATURE (39)..(39): C-terminal amidation

SEQ ID NO: 2145 - protein, 31 aa, Artificial Sequence; identical to SEQ ID NO: 2102
  Synthetic peptide
  MISC_FEATURE: Analog #34
  MISC_FEATURE (2)..(2): Xaa is AIB
  MISC_FEATURE (10)..(10): Acylated with a C12-C18 fatty acyl group via acidic amino acid spacer
  MISC_FEATURE (31)..(31): C-terminal amidation

SEQ ID NO: 2146 - protein, 29 aa, Artificial Sequence
  Synthetic peptide
  MISC_FEATURE: Analog #36
  MISC_FEATURE (2)..(2): d-Ser
  MISC_FEATURE (10)..(10): Acylated with a C12-C18 fatty acyl group via acidic amino acid spacer
  MISC_FEATURE (20)..(20): Xaa is AIB
  MISC_FEATURE (29)..(29): C-terminal amidation
HSQGTFTSDKSKYLDERRAXEFVQWLLDT

SEQ ID NO: 2147 - protein, 29 aa, Artificial Sequence
  Synthetic peptide
  MISC_FEATURE: Analog #37
  MISC_FEATURE (2)..(2): Xaa is AIB
  MISC_FEATURE (10)..(10): Acylated with a C12-C18 fatty acyl group via acidic amino acid spacer
  MISC_FEATURE (20)..(20): Xaa is AIB
  MISC_FEATURE (29)..(29): C-terminal amidation
HXQGTFTSDKSKYLDERRAXEFVQWLLDT

SEQ ID NO: 2148 - protein, 29 aa, Artificial Sequence
  Synthetic peptide
  MISC_FEATURE: Analog #44
  MISC_FEATURE (1)..(1): Xaa is alpha-dimethyl imidiazole acetic acid (DMIA)
  MISC_FEATURE (2)..(2): d-Ser
  MISC_FEATURE (10)..(10): Acylated with C12-C18 fatty acyl group via acidic amino acid spacer
  MISC_FEATURE (29)..(29): C-terminal amidation
XSQGTFTSDKSKYLDERAAQDFVQWLLDT

SEQ ID NO: 2149 - protein, 39 aa, Artificial Sequence; identical to SEQ ID NO: 2106
  Synthetic peptide
  MISC_FEATURE: Analog #49
  MISC_FEATURE (2)..(2): Xaa is AIB
  MISC_FEATURE (10)..(10): Acylated with a C12-C18 fatty acyl group via dipeptide spacer
  MISC_FEATURE (16)..(16): Xaa is AIB
  MISC_FEATURE (39)..(39): C-terminal amidation

SEQ ID NO: 2150 - protein, 39 aa, Artificial Sequence; identical to SEQ ID NO: 2107
  Synthetic peptide
  MISC_FEATURE: Analog #53
  MISC_FEATURE (2)..(2): Xaa is AIB
  MISC_FEATURE (10)..(10): Acylated with a C12-C18 fatty acyl group via dipeptide spacer
  MISC_FEATURE (16)..(16): Xaa is AIB
  MISC_FEATURE (39)..(39): C-terminal amidation

SEQ ID NO: 2151 - protein, 39 aa, Artificial Sequence; identical to SEQ ID NO: 2108
  Synthetic peptide
  MISC_FEATURE: Analog #54
  MISC_FEATURE (2)..(2): Xaa is AIB
  MISC_FEATURE (10)..(10): Acylated with C12-C18 fatty acyl group via acidic amino acid spacer
  MISC_FEATURE (16)..(16): Xaa is AIB
  MISC_FEATURE (39)..(39): C-terminal amidation

SEQ ID NO: 2152 - protein, 39 aa, Artificial Sequence; identical to SEQ ID NO: 2109
  Synthetic peptide
  MISC_FEATURE: Analog #61
  MISC_FEATURE (2)..(2): Xaa is AIB
  MISC_FEATURE (10)..(10): Acylated with a C12-C18 fatty acyl group via acidic amino acid spacer
  MISC_FEATURE (20)..(20): Xaa is AIB
  MISC_FEATURE (39)..(39): C-terminal amidation

SEQ ID NO: 2153 - protein, 39 aa, Artificial Sequence; identical to SEQ ID NO: 2110
  Synthetic peptide
  MISC_FEATURE: Analog #62
  MISC_FEATURE (2)..(2): Xaa is AIB
  MISC_FEATURE (10)..(10): Acylated with a C12-C18 fatty acyl group via acidic amino acid spacer
  MISC_FEATURE (20)..(20): Xaa is AIB
  MISC_FEATURE (39)..(39): C-terminal amidation

SEQ ID NO: 2154 - protein, 39 aa, Artificial Sequence; identical to SEQ ID NO: 2012
  Synthetic peptide
  MISC_FEATURE: Analog #63
  MISC_FEATURE (2)..(2): Xaa is AIB
  MISC_FEATURE (10)..(10): Acylated with a C12-C18 fatty acyl group via acidic amino acid spacer
  MISC_FEATURE (39)..(39): C-terminal amidation

SEQ ID NO: 2155 - protein, 29 aa, Artificial Sequence
  Synthetic peptide
  MISC_FEATURE: Analog #64
  MISC_FEATURE (2)..(2): Xaa is AIB
  MISC_FEATURE (10)..(10): Acylated with a C12-C18 fatty acyl group via acidic amino acid spacer
  MISC_FEATURE (20)..(20): Xaa is AIB
  MISC_FEATURE (29)..(29): C-terminal amidation
HXEGTFTSDKSKYLDERRAXEFVQWLLDT

SEQ ID NO: 2156 - protein, 39 aa, Artificial Sequence; identical to SEQ ID NO: 2113
  Synthetic peptide
  MISC_FEATURE: Analog #65
  MISC_FEATURE (2)..(2): Xaa is AIB
  MISC_FEATURE (10)..(10): Acylated with a C12-C18 fatty acyl group via acidic amino acid spacer
  MISC_FEATURE (20)..(20): Xaa is AIB
  MISC_FEATURE (39)..(39): C-terminal amidation

SEQ ID NO: 2157 - protein, 29 aa, Artificial Sequence
  Synthetic peptide
  MISC_FEATURE (2)..(2): Xaa is AIB
  MISC_FEATURE (9)..(9): Acylated with a C12-C18 fatty acyl group via dipeptide spacer
  MISC_FEATURE (16)..(16): Xaa is AIB
  MISC_FEATURE (29)..(29): C-terminal amidation
HXQGTFTSKYSKYLDXRRAQDFVQWLMNT

SEQ ID NO: 2158 - protein, 29 aa, Artificial Sequence
  Synthetic peptide
  MISC_FEATURE (2)..(2): Xaa is AIB
  MISC_FEATURE (10)..(10): Acylated with a C12-C18 fatty acyl group via dipeptide spacer
  MISC_FEATURE (16)..(16): Xaa is AIB
  MISC_FEATURE (29)..(29): C-terminal amidation
HXQGTFTSDKSKYLDXRRAQDFVQWLMNT

SEQ ID NO: 2159 - protein, 29 aa, Artificial Sequence
  Synthetic peptide
  MISC_FEATURE (2)..(2): Xaa is AIB
  MISC_FEATURE (12)..(12): Acylated with a C12-C18 fatty acyl group via dipeptide spacer
  MISC_FEATURE (16)..(16): Xaa is AIB
  MISC_FEATURE (29)..(29): C-terminal amidation
HXQGTFTSDYSKYLDXRRAQDFVQWLMNT

SEQ ID NO: 2160 - protein, 29 aa, Artificial Sequence
  Synthetic peptide
  MISC_FEATURE (2)..(2): Xaa is AIB
  MISC_FEATURE (16)..(16): Acylated with a C12-C18 fatty acyl group via dipeptide spacer
  MISC_FEATURE (29)..(29): C-terminal amidation
HXQGTFTSDYSKYLDKRRAQDFVQWLMNT

SEQ ID NO: 2161 - protein, 29 aa, Artificial Sequence
  Synthetic peptide
  MISC_FEATURE (2)..(2): Xaa is AIB
  MISC_FEATURE (16)..(16): Xaa is AIB
  MISC_FEATURE (20)..(20): Acylated with a C12-C18 fatty acyl group via dipeptide spacer
  MISC_FEATURE (29)..(29): C-terminal amidation
HXQGTFTSDYSKYLDXRRAKDFVQWLMNT

SEQ ID NO: 2162 - protein, 39 aa, Artificial Sequence; identical to SEQ ID NO: 2119
  Synthetic peptide
  MISC_FEATURE (2)..(2): Xaa is AIB
  MISC_FEATURE (10)..(10): Acylated with a C12-C18 acyl group via acidic amino acid spacer
  MISC_FEATURE (20)..(20): Xaa is AIB
  MISC_FEATURE (39)..(39): C-terminal amidation

SEQ ID NO: 2163 - protein, 39 aa, Artificial Sequence; identical to SEQ ID NO: 2119
  Synthetic peptide
  MISC_FEATURE (2)..(2): Xaa is AIB
  MISC_FEATURE (10)..(10): Acylated with a C12-C18 fatty acyl group via acidic amino acid spacer
  MISC_FEATURE (20)..(20): Xaa is AIB
  MISC_FEATURE (39)..(39): Covalently bound to PEG
  MISC_FEATURE (39)..(39): C-terminal amidation

SEQ ID NO: 2164 - protein, 41 aa, Artificial Sequence; identical to SEQ ID NO: 2121
  Synthetic peptide
  MISC_FEATURE (2)..(2): Xaa is AIB
  MISC_FEATURE (20)..(20): Xaa is AIB
  MISC_FEATURE (40)..(40): Acylated with a C12-C18 fatty acyl group via acidic amino acid spacer
  MISC_FEATURE (41)..(41): C-terminal amidation

SEQ ID NO: 2165 - protein, 41 aa, Artificial Sequence; identical to SEQ ID NO: 2122
  Synthetic peptide
  MISC_FEATURE (2)..(2): Xaa is AIB
  MISC_FEATURE (20)..(20): Xaa is AIB
  MISC_FEATURE (40)..(40): Acylated with a C12-C18 fatty acyl group via acidic amino acid spacer
  MISC_FEATURE (41)..(41): Covalently bound to PEG
  MISC_FEATURE (41)..(41): C-terminal amidation

SEQ ID NO: 2166 - protein, 40 aa, Artificial Sequence; identical to SEQ ID NO: 2120
  Synthetic peptide
  MISC_FEATURE (2)..(2): Xaa is AIB
  MISC_FEATURE (10)..(10): Acylated with a C12-C18 fatty acyl group via acidic amino acid spacer
  MISC_FEATURE (20)..(20): Xaa is AIB
  MISC_FEATURE (40)..(40): Covalently bound to PEG
  MISC_FEATURE (40)..(40): C-terminal amidation

SEQ ID NO: 2167 - protein, 40 aa, Artificial Sequence; identical to SEQ ID NO: 2120
  Synthetic peptide
  MISC_FEATURE (2)..(2): Xaa is AIB
  MISC_FEATURE (10)..(10): Acylated with a C12-C18 fatty acyl group via acidic amino acid spacer
  MISC_FEATURE (20)..(20): Xaa is AIB
  MISC_FEATURE (40)..(40): Covalently bound to PEG
  MISC_FEATURE (40)..(40): C-terminal amidation

SEQ ID NO: 2168 - protein, 31 aa, Artificial Sequence; identical to SEQ ID NO: 2126
  Synthetic peptide
  MISC_FEATURE (2)..(2): Xaa is AIB
  MISC_FEATURE (10)..(10): Acylated with a C12-C18 fatty acyl group via acidic amino acid spacer
  MISC_FEATURE (20)..(20): Xaa is AIB
  MISC_FEATURE (31)..(31): C-terminal amidation

SEQ ID NO: 2169 - protein, 31 aa, Artificial Sequence; identical to SEQ ID NO: 2127
  Synthetic peptide
  MISC_FEATURE (2)..(2): d-Ser
  MISC_FEATURE (10)..(10): Acylated with a C12-C18 fatty acyl group via acidic amino acid spacer
  MISC_FEATURE (20)..(20): Xaa is AIB
  MISC_FEATURE (31)..(31): C-terminal amidation

SEQ ID NO: 2170 - protein, 39 aa, Artificial Sequence; identical to SEQ ID NO: 2128
  Synthetic peptide
  MISC_FEATURE (2)..(2): d-Ser
  MISC_FEATURE (10)..(10): Acylated with a C12-C18 fatty acyl group via acidic amino acid spacer
  MISC_FEATURE (20)..(20): Xaa is AIB
  MISC_FEATURE (39)..(39): C-terminal amidation

SEQ ID NO: 2171 - protein, 39 aa, Artificial Sequence; identical to SEQ ID NO: 2109
  Synthetic peptide
  MISC_FEATURE (2)..(2): Xaa is AIB
  MISC_FEATURE (10)..(10): Acylated with a C12-C18 fatty acyl group via acidic amino acid spacer
  MISC_FEATURE (20)..(20): Xaa is AIB
  MISC_FEATURE (39)..(39): C-terminal amidation

SEQ ID NO: 2172 - protein, 39 aa, Artificial Sequence; identical to SEQ ID NO: 2012
  Synthetic peptide
  MISC_FEATURE (2)..(2): Xaa is AIB
  MISC_FEATURE (10)..(10): Acylated with a C12-C18 fatty acyl group via acidic amino acid spacer
  MISC_FEATURE (39)..(39): C-terminal amidation

SEQ ID NO: 2173 - protein, 39 aa, Artificial Sequence; identical to SEQ ID NO: 2119
  Synthetic peptide
  MISC_FEATURE (2)..(2): Xaa is AIB
  MISC_FEATURE (10)..(10): Acylated with C12-C18 fatty acyl group via dipeptide spacer
  MISC_FEATURE (20)..(20): Xaa is AIB
  MISC_FEATURE (39)..(39): C-terminal amidation

SEQ ID NO: 2174 - protein, 39 aa, Artificial Sequence; identical to SEQ ID NO: 758
  Synthetic peptide
  MISC_FEATURE (2)..(2): Xaa is AIB
  MISC_FEATURE (10)..(10): Acylated with C12-C18 fatty acyl group via dipeptide spacer
  MISC_FEATURE (20)..(20): Xaa is AIB
  MISC_FEATURE (39)..(39): C-terminal amidation

SEQ ID NO: 2175 - protein, 39 aa, Artificial Sequence; identical to SEQ ID NO: 2133
  Synthetic peptide
  MISC_FEATURE (2)..(2): Xaa is AIB
  MISC_FEATURE (10)..(10): Acylated with a C12-C18 fatty acyl group via acidic amino acid spacer
  MISC_FEATURE (20)..(20): Xaa is AIB
  MISC_FEATURE (39)..(39): C-terminal amidation

SEQ ID NO: 2176 - protein, 39 aa, Artificial Sequence; identical to SEQ ID NO: 2113
  Synthetic peptide
  MISC_FEATURE (2)..(2): Xaa is AIB
  MISC_FEATURE (10)..(10): Acylated with C12-C18 fatty acyl group via acidic amino acid spacer
  MISC_FEATURE (20)..(20): Xaa is AIB
  MISC_FEATURE (39)..(39): C-terminal amidation

SEQ ID NO: 2177 - protein, 29 aa, Artificial Sequence
  Synthetic peptide
  MISC_FEATURE (2)..(2): Xaa is AIB
  MISC_FEATURE (10)..(10): Acylated with a C12-C18 fatty acyl group via acidic amino acid spacer
  MISC_FEATURE (20)..(20): Xaa is AIB
  MISC_FEATURE (29)..(29): C-terminal amidation
HXEGTFTSDKSKYLDERRAXEFVQWLLDT

SEQ ID NO: 2178 - protein, 41 aa, Artificial Sequence; identical to SEQ ID NO: 2011
  Synthetic peptide
  MISC_FEATURE (2)..(2): Xaa is AIB
  MISC_FEATURE (40)..(40): Acylated with a C12-C18 fatty acyl group via dipeptide spacer
  MISC_FEATURE (41)..(41): C-terminal amidation

SEQ ID NO: 2179 - protein, 39 aa, Artificial Sequence; identical to SEQ ID NO: 2010
  Synthetic peptide
  MISC_FEATURE (2)..(2): Xaa is AIB
  MISC_FEATURE (10)..(10): Acylated with a C12-C18 fatty acyl group via dipeptide spacer
  MISC_FEATURE (39)..(39): C-terminal amidation

SEQ ID NO: 2180 - protein, 39 aa, Artificial Sequence; identical to SEQ ID NO: 2141
  Synthetic peptide
  MISC_FEATURE (2)..(2): Xaa is AIB
  MISC_FEATURE (10)..(10): Acylated with a C12-C18 fatty acyl group via dipeptide spacer
  MISC_FEATURE (20)..(20): Xaa is AIB
  MISC_FEATURE (39)..(39): C-terminal amidation

SEQ ID NO: 2181 - protein, 29 aa, Artificial Sequence
  Synthetic peptide
  MISC_FEATURE (2)..(2): Xaa is AIB
  MISC_FEATURE (10)..(10): Acylated with a C12-C18 fatty acyl group via dipeptide spacer
  misc_feature (20)..(20): Xaa can be any naturally occurring amino acid
  MISC_FEATURE (29)..(29): C-terminal amidation
YXQGTFTSDKSIYLDKQAAXEFVNWLLDT

SEQ ID NO: 2182 - protein, 40 aa, Artificial Sequence; identical to SEQ ID NO: 756
  Synthetic polypeptide
  MISC_FEATURE: mt-261
  MOD_RES (2)..(2): Xaa is Aib
  MOD_RES (20)..(20): Xaa is Aib
  MISC_FEATURE (40)..(40): C12-C18 fatty acyl group covalently attached Lysine
  MISC_FEATURE (40)..(40): C-terminal amidation

SEQ ID NO: 2183 - protein, 40 aa, Artificial Sequence; identical to SEQ ID NO: 1123
  Synthetic polypeptide
  MISC_FEATURE: mt-278
  MOD_RES (2)..(2): Xaa is Aib
  MOD_RES (20)..(20): Xaa is Aib
  MISC_FEATURE (40)..(40): C12-C18 fatty acyl group covalently attached to Lysine
  MISC_FEATURE (40)..(40): C-terminal amidation

SEQ ID NO: 2184 - protein, 39 aa, Artificial Sequence; identical to SEQ ID NO: 2119
  Synthetic peptide
  MISC_FEATURE: mt-384
  MISC_FEATURE (2)..(2): Xaa is AIB
  MISC_FEATURE (10)..(10): Covalently bound to a C12-C18 fatty acyl group via dipeptide spacer
  MISC_FEATURE (20)..(20): Xaa is AIB
  MISC_FEATURE (39)..(39): C-terminal amidation

SEQ ID NO: 2185 - protein, 39 aa, Artificial Sequence; identical to SEQ ID NO: 2119
  Synthetic peptide
  MISC_FEATURE: mt-384
  MISC_FEATURE (2)..(2): Xaa is AIB
  MISC_FEATURE (10)..(10): Acylated with a C12-C18 fatty acyl group via dipeptide spacer
  MISC_FEATURE (20)..(20): Xaa is AIB
  MISC_FEATURE (39)..(39): C-terminal amidation

SEQ ID NO: 2186 - protein, 40 aa, Artificial Sequence; identical to SEQ ID NO: 756
  Synthetic peptide
  MISC_FEATURE (2)..(2): Xaa is AIB
  MISC_FEATURE (20)..(20): Xaa is AIB
  MISC_FEATURE (40)..(40): Covalently bound to a C12-C18 fatty acyl group
  MISC_FEATURE (40)..(40): C-terminal amidation

SEQ ID NO: 2187 - protein, 41 aa, Artificial Sequence
  Synthetic peptide
  MISC_FEATURE (2)..(2): Xaa is AIB
  MISC_FEATURE (20)..(20): Xaa is AIB
  MISC_FEATURE (40)..(40): Covalently bound to a C12-C18 fatty acyl group
  MISC_FEATURE (41)..(41): C-terminal amidation
YXEGTFTSDYSIYLDKQAAXEFVNWLLAGGPSSGAPPPSKG

SEQ ID NO: 2188 - protein, 41 aa, Artificial Sequence; identical to SEQ ID NO: 2187
  Synthetic peptide
  MISC_FEATURE (2)..(2): Xaa is AIB
  MISC_FEATURE (20)..(20): Xaa is AIB
  MISC_FEATURE (40)..(40): Covantly bound to a C12-C18 succinoyl
  MISC_FEATURE (41)..(41): C-terminal amidation

SEQ ID NO: 2189 - protein, 41 aa, Artificial Sequence; identical to SEQ ID NO: 2187
  Synthetic peptide
  MISC_FEATURE (2)..(2): Xaa is AIB
  MISC_FEATURE (20)..(20): Xaa is AIB
  MISC_FEATURE (40)..(40): Covalently bound to a C12-C18 succinoyl via a beta-Ala spacer
  MISC_FEATURE (41)..(41): C-terminal amidation

SEQ ID NO: 2190 - protein, 41 aa, Artificial Sequence; identical to SEQ ID NO: 2187
  Synthetic peptide
  MISC_FEATURE (2)..(2): Xaa is AIB
  MISC_FEATURE (20)..(20): Xaa is AIB
  MISC_FEATURE (40)..(40): Covalently bound to a C12-C18 succinoyl
  MISC_FEATURE (41)..(41): C-terminal amidation

SEQ ID NO: 2191 - protein, 39 aa, Artificial Sequence; identical to SEQ ID NO: 1198
  Synthetic peptide
  MISC_FEATURE (2)..(2): Xaa is AIB
  MISC_FEATURE (10)..(10): Xaa is 4-amino-Phe
  MISC_FEATURE (10)..(10): 4-amino-Phe covalently bound a C12-C18 fatty acyl group via dipeptide spacer
  MISC_FEATURE (20)..(20): Xaa is AIB
  MISC_FEATURE (39)..(39): C-terminal amidation

SEQ ID NO: 2192 - protein, 39 aa, Artificial Sequence; identical to SEQ ID NO: 1198
  Synthetic peptide
  MISC_FEATURE (2)..(2): Xaa is AIB
  MISC_FEATURE (10)..(10): Xaa is 4-amino-Phe
  MISC_FEATURE (10)..(10): 4-amino-Phe is covalently bound to a C12-C18 succinoyl
  MISC_FEATURE (20)..(20): Xaa is AIB
  MISC_FEATURE (39)..(39): C-terminal amidation

SEQ ID NO: 2193 - protein, 41 aa, Artificial Sequence
  Synthetic peptide
  MISC_FEATURE (2)..(2): Xaa is AIB
  MISC_FEATURE (40)..(40): Xaa is 4-amino-Phe
  MISC_FEATURE (40)..(40): 4-amino-Phe covalently bound to a C12-C18 fatty acyl group via dipeptide spacer
  MISC_FEATURE (41)..(41): C-terminal amidation
HXQGTFTSDYSKYLDERAAQDFVQWLLDGGPSSGAPPPSXG

SEQ ID NO: 2194 - protein, 41 aa, Artificial Sequence; identical to SEQ ID NO: 2193
  Synthetic peptide
  MOD_RES (2)..(2): Xaa is AIB
  MOD_RES (40)..(40): Xaa is 4-amino Phe
  MOD_RES (40)..(40): 4-amino Phe covalently bound to C12-C18 succinoyl
  MOD_RES (41)..(41): C-terminal amidation

SEQ ID NO: 2195 - protein, 39 aa, Artificial Sequence
  Synthetic peptide
  MISC_FEATURE (2)..(2): Xaa is AIB
  MISC_FEATURE (6)..(6): Xaa is 4-amino-Phe
  MISC_FEATURE (6)..(6): 4-amino-Phe covalently bound to a C12-C18 fatty acyl group via acidic amino acid spacer
  MISC_FEATURE (39)..(39): C-terminal amidation
HXQGTXTSDYSKYLDERAAQDFVQWLLDGGPSSGAPPPS

SEQ ID NO: 2196 - protein, 39 aa, Artificial Sequence
  Synthetic peptide
  MISC_FEATURE (2)..(2): Xaa is AIB
  MISC_FEATURE (10)..(10): Xaa is 4-amino-Phe
  MISC_FEATURE (10)..(10): 4-amino-Phe covalently bound to a C12-C18 fatty acyl group via acidic amino acid spacer
  MISC_FEATURE (39)..(39): C-terminal amidation
HXQGTFTSDXSKYLDERAAQDFVQWLLDGGPSSGAPPPS

SEQ ID NO: 2197 - protein, 39 aa, Artificial Sequence
  Synthetic peptide
  MISC_FEATURE (2)..(2): Xaa is AIB
  MISC_FEATURE (13)..(13): Xaa is 4-amino-Phe
  MISC_FEATURE (13)..(13): 4-amino-Phe covalently bound to a C12-C18 fatty acyl group via acidic amino acid spacer
  MISC_FEATURE (39)..(39): C-terminal amidation
HXQGTFTSDYSKXLDERAAQDFVQWLLDGGPSSGAPPPS

SEQ ID NO: 2198 - protein, 39 aa, Artificial Sequence; identical to SEQ ID NO: 2196
  Synthetic peptide
  MISC_FEATURE (2)..(2): Xaa is AIB
  MISC_FEATURE (10)..(10): Xaa is 4-amino-Phe
  MISC_FEATURE (10)..(10): 4-amino-Phe covalently bound to C12-C18 succinoyl
  MISC_FEATURE (39)..(39): C-terminal amidation

SEQ ID NO: 2199 - protein, 39 aa, Artificial Sequence
  Synthetic peptide
  MOD_RES (2)..(2): Xaa is AIB
  MOD_RES (13)..(13): Covalently bound to a C12-C18 fatty acyl group via acidic amino acid spacer
  MOD_RES (39)..(39): C-terminal amidation
HXQGTFTSDYSKKLDERAAQDFVQWLLDGGPSSGAPPPS

SEQ ID NO: 2200 - protein, 39 aa, Artificial Sequence
  Synthetic peptide
  MISC_FEATURE (2)..(2): Xaa is AIB
  MISC_FEATURE (14)..(14): Covalently bound to a C12-C18 fatty acyl group via acidic amino acid spacer
  MISC_FEATURE (39)..(39): C-terminal amidation
HXQGTFTSDYSKYKDERAAQDFVQWLLDGGPSSGAPPPS

SEQ ID NO: 2201 - protein, 39 aa, Artificial Sequence
  Synthetic peptide
  MISC_FEATURE (2)..(2): Xaa is AIB
  MISC_FEATURE (16)..(16): Covalently bound to a C12-C18 fatty acyl group via acidic amino acid spacer
  MISC_FEATURE (39)..(39): C-terminal amidation
HXQGTFTSDYSKYLDKRAAQDFVQWLLDGGPSSGAPPPS

SEQ ID NO: 2202 - protein, 39 aa, Artificial Sequence
  Synthetic peptide
  MISC_FEATURE (2)..(2): Xaa is AIB
  MISC_FEATURE (17)..(17): Covalently bound to a C12-C18 fatty acyl group via acidic amino acid spacer
  MISC_FEATURE (39)..(39): C-terminal amidation
HXQGTFTSDYSKYLDEKAAQDFVQWLLDGGPSSGAPPPS

SEQ ID NO: 2203 - protein, 41 aa, Artificial Sequence; identical to SEQ ID NO: 2011
  Synthetic peptide
  MISC_FEATURE (2)..(2): Xaa is AIB
  MISC_FEATURE (40)..(40): Covalently bound to a C12-C18 fatty acyl group via acidic amino acid spacer
  MISC_FEATURE (41)..(41): C-terminal amidation

SEQ ID NO: 2204 - protein, 41 aa, Artificial Sequence; identical to SEQ ID NO: 2011
  Synthetic peptide
  MISC_FEATURE (2)..(2): Xaa is AIB
  MISC_FEATURE (40)..(40): Covalently bound to C12-C18 succinoyl
  MISC_FEATURE (41)..(41): C-terminal amidation

SEQ ID NO: 2205 - protein, 41 aa, Artificial Sequence; identical to SEQ ID NO: 2011
  Synthetic peptide
  MISC_FEATURE (2)..(2): Xaa is AIB
  MISC_FEATURE (40)..(40): Covalently bound to C12-C18 fatty acyl group via a spacer comprising an amido miniPEG acid and an acidic amino acid, wherein the amido miniPEG acid has a structure {-N- CH2- CH2-[-O-CH2-CH2-]n-COO-}, wherein n is 2
  MISC_FEATURE (41)..(41): C-terminal amidation

SEQ ID NO: 2206 - protein, 41 aa, Artificial Sequence; identical to SEQ ID NO: 2011
  Synthetic peptide
  MISC_FEATURE (2)..(2): Xaa is AIB
  MISC_FEATURE (40)..(40): Covalently bound to a C12-C18 fatty acyl group via spacer comprising an amido miniPEG acid and an acidic amino acid, wherein the amido miniPEG acid has a structure {-N- CH2- CH2-[-O-CH2-CH2-]n-COO-}, wherein n is 4
  MISC_FEATURE (41)..(41): C-terminal amidation

SEQ ID NO: 2207 - protein, 41 aa, Artificial Sequence; identical to SEQ ID NO: 2011
  Synthetic peptide
  MISC_FEATURE (2)..(2): Xaa is AIB
  MISC_FEATURE (40)..(40): Covalently bound to a C12-C18 fatty acyl group via spacer comprising an amido miniPEG acid and an acidic amino acid, wherein the amido miniPEG acid has a structure {-N- CH2- CH2-[-O-CH2-CH2-]n-COO-}, wherein n is 8
  MISC_FEATURE (41)..(41): C-terminal amidation

SEQ ID NO: 2208 - protein, 39 aa, Artificial Sequence; identical to SEQ ID NO: 2010
  Synthetic peptide
  MISC_FEATURE (2)..(2): Xaa is AIB
  MISC_FEATURE (10)..(10): Covalently bound to a Lys spacer, wherein the Lys spacer is attached to two C12-C18 fatty acyl groups, wherein each C12-C18 fatty acyl group is attached to the Lys spacer via acidic amino acid spacer
  MISC_FEATURE (39)..(39): C-terminal amidation

SEQ ID NO: 2209 - protein, 40 aa, Artificial Sequence
  Synthetic peptide
  MISC_FEATURE (2)..(2): Xaa is AIB
  MISC_FEATURE (40)..(40): Covalently bound to a Lys spacer, wherein the Lys spacer is attached to two C12-C18 fatty acyl groups, wherein each C12-C18 fatty acyl group is attached to the Lys spacer via acidic amino acid spacer
  MISC_FEATURE (40)..(40): C-terminal amidation
HXQGTFTSDYSKYLDERAAQDFVQWLLDGGPSSGAPPPSK

SEQ ID NO: 2210 - protein, 39 aa, Artificial Sequence; identical to SEQ ID NO: 2010
  Synthetic peptide
  MISC_FEATURE (2)..(2): Xaa is AIB
  MISC_FEATURE (10)..(10): Covalently bound to a C12-C18 fatty acyl group, which is covalently bound to a acid amino acid spacer, which is covalently bound to a C12-C18 fatty acyl group
  MISC_FEATURE (39)..(39): C-terminal amidation

SEQ ID NO: 2211 - protein, 40 aa, Artificial Sequence
  Synthetic peptide
  MISC_FEATURE (2)..(2): Xaa is AIB
  MISC_FEATURE (10)..(10): Covalently bound to a C12-C18 fatty acyl group via acidic amino acid spacer
  MISC_FEATURE (40)..(40): Covalently bound to a C12-C18 fatty acyl group via acidic amino acid spacer
  MISC_FEATURE (40)..(40): C-terminal amidation
HXQGTFTSDKSKYLDERAAQDFVQWLLDGGPSSGAPPPSK

SEQ ID NO: 2212 - protein, 41 aa, Artificial Sequence; identical to SEQ ID NO: 2011
  Synthetic peptide
  MISC_FEATURE (2)..(2): Xaa is AIB
  MISC_FEATURE (40)..(40): Covalently bound to Cys, which is covalently bound to an acidic amino acid spacer, which is covalently bound to C12-C18 fatty acyl group
  MISC_FEATURE (41)..(41): C-terminal amidation

SEQ ID NO: 2213 - protein, 41 aa, Artificial Sequence; identical to SEQ ID NO: 2011
  Synthetic peptide
  MISC_FEATURE (2)..(2): Xaa is AIB
  MISC_FEATURE (40)..(40): Covalently bound to Cys spacer, which is bound to an acid amino acid spacer, which is bound to a C12-C18 fatty acyl group
  MISC_FEATURE (40)..(40): Covalently bound to SEQ ID NO 212 via Cys spacer which is disulfide bonded to a 2nd Cys, which the 2nd Cys is bound to Lys at position 40 of SEQ ID NO 212 and is bound to an acid amino acid spacer, which, in turn is bound to C12-C18 fatty acyl group
  MISC_FEATURE (41)..(41): C-terminal amidation

SEQ ID NO: 2214 - protein, 41 aa, Artificial Sequence; identical to SEQ ID NO: 2011
  Synthetic peptide
  MISC_FEATURE (2)..(2): Xaa is AIB
  MISC_FEATURE (40)..(40): Covalently bound to Cys, which is bound to an acidic amino acid spacer, which is bound to C16 fatty acyl group and the sulfer of the Cys is thioether linked to a peptide of SEQ ID NO: 282 via Lys at position 40
  MISC_FEATURE (41)..(41): C-terminal amidation

SEQ ID NO: 2215 - protein, 41 aa, Artificial Sequence; identical to SEQ ID NO: 2011
  Synthetic peptide
  MISC_FEATURE (2)..(2): Xaa is AIB
  MISC_FEATURE (40)..(40): Covalently bound to Cys, which is bound to an acidic amino acid spacer, which is bound to C12-C18 fatty acyl group, and the sulfur of the Cys is disulfide bonded to a 2nd Cys, which the 2nd Cys is bound to a peptide of SEQ ID NO: 282 via Lys at position
  MISC_FEATURE (41)..(41): C-terminal amidation

SEQ ID NO: 2216 - protein, 41 aa, Artificial Sequence
  Synthetic peptide
  MISC_FEATURE (2)..(2): Xaa is AIB
  MISC_FEATURE (40)..(40): Covalently bound to a C12-C18 fatty acyl group via dipeptide spacer
  MISC_FEATURE (41)..(41): C-terminal amidation
HXEGTFTSDYSKYLDERAAQDFVQWLLDGGPSSGAPPPSKG

SEQ ID NO: 2217 - protein, 40 aa, Artificial Sequence; identical to SEQ ID NO: 766
  Synthetic peptide
  MISC_FEATURE (2)..(2): Xaa is AIB
  MISC_FEATURE (20)..(20): Xaa is AIB
  MISC_FEATURE (24)..(24): Covalently bound to PEG
  MISC_FEATURE (40)..(40): Covalently bound to C12-C18 fatty acyl group
  MISC_FEATURE (40)..(40): C-terminal amidation

SEQ ID NO: 2218 - protein, 40 aa, Artificial Sequence; identical to SEQ ID NO: 766
  Synthetic peptide
  MISC_FEATURE (2)..(2): Xaa is AIB
  MISC_FEATURE (20)..(20): Xaa is AIB
  MISC_FEATURE (24)..(24): Covalently bound to PEG
  MISC_FEATURE (40)..(40): Covalently bound to C12-C18 fatty acyl group
  MISC_FEATURE (40)..(40): C-terminal amidation

SEQ ID NO: 2219 - protein, 40 aa, Artificial Sequence; identical to SEQ ID NO: 766
  Synthetic peptide
  MISC_FEATURE (2)..(2): Xaa is AIB
  MISC_FEATURE (20)..(20): Xaa is AIB
  MISC_FEATURE (24)..(24): Covalently bound to PEG
  MISC_FEATURE (40)..(40): Covalently bound to C12-C18 fatty acyl group
  MISC_FEATURE (40)..(40): C-terminal amidation

SEQ ID NO: 2220 - protein, 41 aa, Artificial Sequence; identical to SEQ ID NO: 2011
  Synthetic peptide
  MISC_FEATURE (2)..(2): Xaa is AIB
  MISC_FEATURE (40)..(40): Covalently bound to a C12-C18 succinoyl
  MISC_FEATURE (41)..(41): C-terminal amidation

SEQ ID NO: 2221 - protein, 41 aa, Artificial Sequence; identical to SEQ ID NO: 2011
  Synthetic peptide
  MISC_FEATURE (2)..(2): Xaa is AIB
  MISC_FEATURE (40)..(40): Covalently bound to C12-C18 fatty acyl group
  MISC_FEATURE (41)..(41): C-terminal amidation

SEQ ID NO: 2222 - protein, 41 aa, Artificial Sequence
  Synthetic peptide
  MISC_FEATURE (2)..(2): Xaa is AIB
  MISC_FEATURE (10)..(10): Xaa is Tyr or an amino acid covalently bound to a C10 to C26 acyl or alkyl group
  MISC_FEATURE (18)..(18): Xaa is Arg or Ala
  MISC_FEATURE (20)..(20): Xaa is AIB or Gln
  MISC_FEATURE (21)..(21): Xaa is Asp or Glu
  MISC_FEATURE (28)..(28): Xaa is Asp or Glu
  MISC_FEATURE (35)..(35): Xaa is Ala, Arg or Lys
  MISC_FEATURE (40)..(40): Xaa is absent or is Gly (e.g. when position 10 is not Tyr) or is an amino acid covalently bound to a C10-C26 acyl or alkyl group
  MISC_FEATURE (41)..(41): Optionally present, when residue at position 40 is an amino acid covalently bound to C10-C26 acyl or alkyl group, Xaa is Gly
  MISC_FEATURE (41)..(41): C-terminal amidation
HXQGTFTSDXSKYLDERXAXXFVQWLLXGGPSSGXPPPSXX

SEQ ID NO: 2223 - protein, 41 aa, Artificial Sequence
  Synthetic peptide
  MISC_FEATURE (2)..(2): Xaa is AIB
  MISC_FEATURE (10)..(10): Xaa is Tyr or an amino acid covalently bound to a C10 to C26 acyl or alkyl group
  MISC_FEATURE (18)..(18): Xaa is Arg or Ala
  MISC_FEATURE (20)..(20): Xaa is AIB or Gln
  MISC_FEATURE (21)..(21): Xaa is Asp or Glu
  MISC_FEATURE (40)..(40): Xaa is absent or is Gly (e.g. when position 10 is not Tyr) or is an amino acid covalently bound to a C10-C26 acyl or alkyl group
  MISC_FEATURE (41)..(41): Optionally present, when residue at position 40 is an amino acid covalently bound to C10-C26 acyl or alkyl group then Xaa is Gly
  MISC_FEATURE (41)..(41): C-terminal amidation
HXQGTFTSDXSKYLDERXAXXFVQWLLDGGPSSGAPPPSXX

SEQ ID NO: 2224 - protein, 41 aa, Artificial Sequence; identical to SEQ ID NO: 2011
  Synthetic peptide
  MISC_FEATURE (2)..(2): Xaa is AIB
  MISC_FEATURE (40)..(40): Covalently bound to C12-C18 fatty acyl group via dipeptide spacer
  MISC_FEATURE (41)..(41): C-terminal amidation

SEQ ID NO: 2225 - protein, 29 aa, Artificial Sequence
  Synthetic peptide
  MISC_FEATURE (1)..(29): At least one amino acid is an amino acid covalently bound to a C10 to C26 acyl or alkyl group
  MISC_FEATURE (2)..(2): Xaa is AIB
  MISC_FEATURE (3)..(3): Xaa is Gln or Gln analog
  MISC_FEATURE (10)..(10): Xaa is Lys or Tyr
  MISC_FEATURE (18)..(18): Xaa is Arg or Ala
  MISC_FEATURE (20)..(20): Xaa is AIB or Gln
  MISC_FEATURE (21)..(21): Xaa is Asp or Glu
  MISC_FEATURE (29)..(29): Xaa is Thr or Gly
  MISC_FEATURE (29)..(29): C-terminal amidation
HXXGTFTSDXSKYLDERXAXXFVQWLLDX

SEQ ID NO: 2226 - protein, 29 aa, Artificial Sequence
  Synthetic peptide
  MISC_FEATURE (2)..(2): Xaa is AIB
  MISC_FEATURE (3)..(3): Xaa is Gln or Gln analog
  MISC_FEATURE (10)..(10): Xaa is Lys covalently bound to a C10-C26 acyl or alkyl group
  MISC_FEATURE (18)..(18): Xaa is Arg or Ala
  MISC_FEATURE (20)..(20): Xaa is AIB or Gln
  MISC_FEATURE (21)..(21): Xaa is Asp or Glu
  MISC_FEATURE (29)..(29): Xaa is Gly or Thr
  MISC_FEATURE (29)..(29): C-terminal amidation
HXXGTFTSDXSKYLDERXAXXFVQWLLDX

SEQ ID NO: 2227 - protein, 39 aa, Artificial Sequence
  Synthetic peptide
  MISC_FEATURE (2)..(2): Xaa is AIB
  MISC_FEATURE (3)..(3): Xaa is Gln or Gln analog
  MISC_FEATURE (10)..(10): Xaa is Tyr or an amino acid covalently bound to a C12-C18 acyl or alkyl group
  MISC_FEATURE (16)..(16): Xaa is any amino acid, optionally, any amino acid other than Gly, Pro, and Ser
  MISC_FEATURE (18)..(18): Xaa is Arg or Ala
  MISC_FEATURE (20)..(20): Xaa is a negative charged amino acid or a charge-neutral amino acid, optionally, AIB or Gln
  MISC_FEATURE (21)..(21): Xaa is is an acidic amino acid, optionally, Asp or Glu
  MISC_FEATURE (27)..(27): Xaa is Leu, Ala, Nle, or Met
  MISC_FEATURE (28)..(28): Xaa is Ala or an acidic amino acid, optionally, Asp or Glu
  MISC_FEATURE (29)..(29): Xaa is Ala or Gly
  MISC_FEATURE (35)..(35): Xaa is Ala or a basic amino acid, optionally, Arg or Lys
  MISC_FEATURE (39)..(39): C-terminal amidation
HXXGTFTSDXSKYLDXRXAXXFVQWLXXXGPSSGXPPPS

SEQ ID NO: 2228 - protein, 39 aa, Artificial Sequence
  Synthetic peptide
  MISC_FEATURE (2)..(2): Xaa is AIB
  MISC_FEATURE (10)..(10): Xaa is Tyr or an amino acid covalently attached to a C12 to C18 acyl or alkyl group
  MISC_FEATURE (16)..(16): Xaa is Glu, an alpha, alpha disubstituted amino acid or Lys
  MISC_FEATURE (18)..(18): Xaa is Arg or Ala
  MISC_FEATURE (20)..(20): Xaa is AIB or Gln
  MISC_FEATURE (21)..(21): Xaa is Asp or Glu
  MISC_FEATURE (27)..(27): Xaa is Leu, Nle, or Met
  MISC_FEATURE (28)..(28): Xaa is Ala, Asp or Glu
  MISC_FEATURE (29)..(29): Xaa is Gly or Thr
  MISC_FEATURE (39)..(39): C-terminal amidation
HXQGTFTSDXSKYLDXRXAXXFVQWLXXXGPSSGAPPPS

SEQ ID NO: 2229 - protein, 29 aa, Artificial Sequence
  Synthetic peptide
  MISC_FEATURE (2)..(2): Xaa is AIB
  MISC_FEATURE (3)..(3): Xaa is Gln or Gln analog
  MISC_FEATURE (10)..(10): Xaa is Tyr or an amino acid covalently attached to a C10 to C26 acyl or alkyl group
  MISC_FEATURE (16)..(16): Xaa is any amino acid, optionally, any amino acid other than Gly, Pro, and Ser
  MISC_FEATURE (18)..(18): Xaa is Arg or Ala
  MISC_FEATURE (20)..(20): Xaa is a negative charged amino acid or a charge-neutral amino acid, optionally, AIB or Gln
  MISC_FEATURE (21)..(21): Xaa is an acidic amino acid, optionally, Asp or Glu
  MISC_FEATURE (27)..(27): Xaa is Leu, Ala, Nle, or Met
  MISC_FEATURE (28)..(28): Xaa is Ala or an acidic amino acid, optionally, Asp or Glu
  MISC_FEATURE (29)..(29): Xaa is Ala, Gly or Thr
  MISC_FEATURE (29)..(29): C-terminal amidation
HXXGTFTSDXSKYLDXRXAXXFVQWLXXX

SEQ ID NO: 2230 - protein, 29 aa, Artificial Sequence
  Synthetic peptide
  MISC_FEATURE (2)..(2): Xaa is AIB
  MISC_FEATURE (10)..(10): Xaa is Tyr or an amino acid covalently bound to a C10 to C26 acyl or alkyl group
  MISC_FEATURE (16)..(16): Xaa is Glu, alpha, alpha-disubstituted amino acid, or Lys
  MISC_FEATURE (18)..(18): Xaa is Arg or Ala
  MISC_FEATURE (20)..(20): Xaa is a negative charged amino acid or a charge-neutral amino acid, optionally, AIB or Gln
  MISC_FEATURE (21)..(21): Xaa is Asp or Glu
  MISC_FEATURE (27)..(27): Xaa is Leu, Ala, Nle, or Met
  MISC_FEATURE (28)..(28): Xaa is Ala, Asp or Glu
  MISC_FEATURE (29)..(29): Xaa is Gly or Thr
  MISC_FEATURE (29)..(29): C-terminal amidation
HXQGTFTSDXSKYLDXRXAXXFVQWLXXX

SEQ ID NO: 2231 - protein, 39 aa, Artificial Sequence; identical to SEQ ID NO: 2227
  Synthetic peptide
  MISC_FEATURE (2)..(2): Xaa is AIB
  MISC_FEATURE (3)..(3): Xaa is an acidic, basic or hydrophobic amino acid, optionally, Glu
  MISC_FEATURE (10)..(10): Xaa is Tyr or an amino acid covalently bound to a C12 to C18 acyl or alkyl group
  MISC_FEATURE (16)..(16): Xaa can be any amino acid, optionally any amino acid other than Gly, Pro or Ser
  MISC_FEATURE (18)..(18): Xaa is Arg or Ala
  MISC_FEATURE (20)..(20): Xaa is a negative charged amino acid or a charge-neutral amino acid, optionally, AIB or Gln
  MISC_FEATURE (21)..(21): Xaa is an acidic amino acid, optionally, Asp or Glu
  MISC_FEATURE (27)..(27): Xaa is Leu, Ala, Nle, or Met
  MISC_FEATURE (28)..(28): Xaa is Ala or an acidic amino acid, optionally, Asp or Glu
  MISC_FEATURE (29)..(29): Xaa is Ala or Gly
  MISC_FEATURE (35)..(35): Xaa is Ala or a basic amino acid, optionally, Arg or Lys
  MISC_FEATURE (39)..(39): C-terminal amidation

SEQ ID NO: 2232 - protein, 39 aa, Artificial Sequence
  Synthetic peptide
  MISC_FEATURE (2)..(2): Xaa is AIB
  MISC_FEATURE (10)..(10): Xaa is Tyr or an amino acid covalently attached to a C12 to C18 acyl or alkyl group
  MISC_FEATURE (16)..(16): Xaa is Glu, an alpha, alpha disubstituted amino acid or Lys
  MISC_FEATURE (18)..(18): Xaa is Arg or Ala
  MISC_FEATURE (20)..(20): Xaa is AIB or Gln
  MISC_FEATURE (21)..(21): Xaa is Asp or Glu
  MISC_FEATURE (27)..(27): Xaa is Leu, Nle, or Met
  MISC_FEATURE (28)..(28): Xaa is Ala, Asp or Glu
  MISC_FEATURE (29)..(29): Xaa is Gly or Thr
  MISC_FEATURE (39)..(39): C-terminal amidation
HXEGTFTSDXSKYLDXRXAXXFVQWLXXXGPSSGAPPPS

SEQ ID NO: 2233 - protein, 29 aa, Artificial Sequence
  Synthetic peptide
  MISC_FEATURE (2)..(2): Xaa is AIB
  MISC_FEATURE (3)..(3): Xaa is an acidic, basic or hydrophobic amino acid, optionally, is Glu
  MISC_FEATURE (10)..(10): Xaa is Tyr or an amino acid covalently bound to a C10 to C26 acyl or alkyl group
  MISC_FEATURE (16)..(16): Xaa is any amino acid, optionally, any amino acid other than Gly, Pro, and Ser
  MISC_FEATURE (18)..(18): Xaa is Arg or Ala
  MISC_FEATURE (20)..(20): Xaa is a negative charged amino acid or a charge-neutral amino acid, optionally, AIB or Gln
  MISC_FEATURE (21)..(21): Xaa is an acidic amino acid, optionally, Asp or Glu
  MISC_FEATURE (27)..(27): Xaa is Leu, Ala, Nle, or Met
  MISC_FEATURE (28)..(28): Xaa is Ala or an acidic amino acid, optionally, Asp or Glu
  MISC_FEATURE (29)..(29): Xaa is Ala, Gly or Thr
  MISC_FEATURE (29)..(29): C-terminal amidation
HXXGTFTSDXSKYLDXRXAXXFVQWLXXX

SEQ ID NO: 2234 - protein, 29 aa, Artificial Sequence
  Synthetic peptide
  MISC_FEATURE (2)..(2): Xaa is AIB
  MISC_FEATURE (10)..(10): Xaa is Tyr or an amino acid covalently bound to a C10 to C26 acyl or alkyl group
  MISC_FEATURE (16)..(16): Xaa is Glu, alpha, alpha-disubstituted amino acid, or Lys
  MISC_FEATURE (18)..(18): Xaa is Arg or Ala
  MISC_FEATURE (20)..(20): Xaa is a negative charged amino acid or a charge-neutral amino acid, optionally, AIB or Gln
  MISC_FEATURE (21)..(21): Xaa is Asp or Glu
  MISC_FEATURE (27)..(27): Xaa is Leu, Ala, Nle, or Met
  MISC_FEATURE (28)..(28): Xaa is Ala, Asp or Glu
  MISC_FEATURE (29)..(29): Xaa is Gly or Thr
  MISC_FEATURE (29)..(29): C-terminal amidation
HXEGTFTSDXSKYLDXRXAXXFVQWLXXX

SEQ ID NO: 2235 - protein, 39 aa, Artificial Sequence; identical to SEQ ID NO: 2227
  Synthetic peptide
  MISC_FEATURE (2)..(2): Xaa is AIB
  MISC_FEATURE (3)..(3): Xaa is Gln or Gln analog or acidic, basic or hydrophobic amino acid, optionally, is Glu or Gln
  MISC_FEATURE (10)..(10): Xaa is Tyr or an amino acid covalently bound to a C12 to C18 acyl or alkyl group
  MISC_FEATURE (16)..(16): Xaa is any amino acid, optionally, any amino acid other than Gly, Pro, and Ser
  MISC_FEATURE (18)..(18): Xaa is Arg or Ala
  MISC_FEATURE (20)..(20): Xaa is a negative charged amino acid or a charge-neutral amino acid, optionally, AIB or Gln
  MISC_FEATURE (21)..(21): Xaa is an acidic amino acid, optionally, Asp or Glu
  MISC_FEATURE (27)..(27): Xaa is Leu, Ala, Nle, or Met
  MISC_FEATURE (28)..(28): Xaa is Ala or an acidic amino acid, optionally, Asp or Glu
  MISC_FEATURE (29)..(29): Xaa is Ala or Gly
  MISC_FEATURE (35)..(35): Xaa is Ala or a basic amino acid, optionally, Arg or Lys
  MISC_FEATURE (39)..(39): C-terminal amidation

SEQ ID NO: 2236 - protein, 39 aa, Artificial Sequence
  Synthetic peptide
  MISC_FEATURE (2)..(2): Xaa is AIB
  MISC_FEATURE (3)..(3): Xaa is Gln or Gln analog or acidic, basic or hydrophobic amino acid, optionally, is Glu or Gln
  MISC_FEATURE (10)..(10): Xaa is Tyr or an amino acid covalently bound to a C12 to C18 acyl or alkyl group
  MISC_FEATURE (16)..(16): Xaa is Glu, an alpha, alpha disubstituted amino acid or Lys
  MISC_FEATURE (18)..(18): Xaa is Arg or Ala
  MISC_FEATURE (20)..(20): Xaa is AIB or Gln
  MISC_FEATURE (21)..(21): Xaa is Asp or Glu
  MISC_FEATURE (27)..(27): Xaa is Leu, Nle, or Met
  MISC_FEATURE (28)..(28): Xaa is Ala, Asp or Glu
  MISC_FEATURE (29)..(29): Xaa is Gly or Thr
  MISC_FEATURE (39)..(39): C-terminal amidation
HXXGTFTSDXSKYLDXRXAXXFVQWLXXXGPSSGAPPPS

SEQ ID NO: 2237 - protein, 29 aa, Artificial Sequence
  Synthetic peptide
  MISC_FEATURE (2)..(2): Xaa is AIB
  MISC_FEATURE (3)..(3): Xaa is Gln or Gln analog or acidic, basic or hydrophobic amino acid, optionally, is Glu or Gln
  MISC_FEATURE (10)..(10): Xaa is Tyr or an amino acid covalently bound to a C10 to C26 acyl or alkyl group
  MISC_FEATURE (16)..(16): Xaa is any amino acid, optionally, any amino acid other than Gly, Pro, and Ser
  MISC_FEATURE (18)..(18): Xaa is Arg or Ala
  MISC_FEATURE (20)..(20): Xaa is a negative charged amino acid or a charge-neutral amino acid, optionally, AIB or Gln
  MISC_FEATURE (21)..(21): Xaa is an acidic amino acid, optionally, Asp or Glu
  MISC_FEATURE (27)..(27): Xaa is Leu, Ala, Nle, or Met
  MISC_FEATURE (28)..(28): Xaa is Ala or an acidic amino acid, optionally, Asp or Glu
  MISC_FEATURE (29)..(29): Xaa is Ala, Gly or Thr
  MISC_FEATURE (29)..(29): C-terminal amidation
HXXGTFTSDXSKYLDXRXAXXFVQWLXXX

SEQ ID NO: 2238 - protein, 29 aa, Artificial Sequence
  Synthetic peptide
  MISC_FEATURE (2)..(2): Xaa is AIB
  MISC_FEATURE (3)..(3): Xaa is Gln or Gln analog or acidic, basic or hydrophobic amino acid, optionally, is Glu or Gln
  MISC_FEATURE (10)..(10): Xaa is Tyr or an amino acid covalently bound to a C10 to C26 acyl or alkyl group
  MISC_FEATURE (16)..(16): Xaa is Glu, alpha, alpha-disubstituted amino acid, or Lys
  MISC_FEATURE (18)..(18): Xaa is Arg or Ala
  MISC_FEATURE (20)..(20): Xaa is a negative charged amino acid or a charge-neutral amino acid, optionally, AIB or Gln
  MISC_FEATURE (21)..(21): Xaa is Asp or Glu
  MISC_FEATURE (27)..(27): Xaa is Leu, Ala, Nle, or Met
  MISC_FEATURE (28)..(28): Xaa is Ala, Asp or Glu
  MISC_FEATURE (29)..(29): Xaa is Gly or Thr
  MISC_FEATURE (29)..(29): C-terminal amidation
HXXGTFTSDXSKYLDXRXAXXFVQWLXXX

SEQ ID NO: 2239 - protein, 41 aa, Artificial Sequence; identical to SEQ ID NO: 2051
  Synthetic peptide
  MISC_FEATURE (2)..(2): Xaa is AIB
  MISC_FEATURE (40)..(40): Covalently bound to C12-C18 fatty acyl group via dipeptide spacer
  MISC_FEATURE (41)..(41): C-terminal amidation

SEQ ID NO: 2240 - protein, 41 aa, Artificial Sequence; identical to SEQ ID NO: 2052
  Synthetic peptide
  MISC_FEATURE (2)..(2): Xaa is AIB
  MISC_FEATURE (40)..(40): Covalently bound to C12-C18 fatty acyl group via dipeptide spacer
  MISC_FEATURE (41)..(41): C-terminal amidation

SEQ ID NO: 2241 - protein, 40 aa, Artificial Sequence
  Synthetic peptide
  MISC_FEATURE (2)..(2): Xaa is AIB
  MISC_FEATURE (10)..(10): Covalently bound to a C12-C18 fatty acyl group via acidic amino acid spacer
  MISC_FEATURE (40)..(40): C-terminal amidation
HXQGTFTSDKSKYLDERAAQDFVQWLLDGGPSSGAPPPSG

SEQ ID NO: 2242 - protein, 39 aa, Artificial Sequence
  Synthetic peptide
  MISC_FEATURE (2)..(2): Xaa is AIB
  MISC_FEATURE (10)..(10): Covalently bound to a C12-C18 fatty acyl group via acidic amino acid spacer
  MISC_FEATURE (39)..(39): C-terminal amidation
HXQGTFTSDKSKYLDERAAQDFVQWLLEGGPSSGRPPPS

SEQ ID NO: 2243 - protein, 40 aa, Artificial Sequence; identical to SEQ ID NO: 2241
  Synthetic peptide
  MISC_FEATURE (2)..(2): Xaa is AIB
  MISC_FEATURE (10)..(10): Covalently bound to a C12-C18 fatty acyl group via dipeptide spacer
  MISC_FEATURE (40)..(40): C-terminal amidation

SEQ ID NO: 2244 - protein, 41 aa, Artificial Sequence
  Synthetic peptide
  MISC_FEATURE (2)..(2): Xaa is AIB
  MISC_FEATURE (40)..(40): Covalently bound to Lys spacer, wherein Lys spacer is bound via alpha amine to an acidic amino acid spacer, which is bound to C12-C18 fatty acyl group and Lys spacer is bound via epsilon amine to an acidic amino acid which is bound to C12-C18 fatty
  MISC_FEATURE (41)..(41): C-terminal amidation
YXQGTFTSDYSKYLDERAAQDFVQWLLDGGPSSGAPPPSKG

SEQ ID NO: 2245 - protein, 41 aa, Artificial Sequence; identical to SEQ ID NO: 2244
  Synthetic peptide
  MISC_FEATURE (2)..(2): Xaa is AIB
  MISC_FEATURE (40)..(40): Covalently bound to a Lys spacer, wherein the Lys spacer is bound to C12-C18 fatty acyl group via an acidic amino acid spacer
  MISC_FEATURE (41)..(41): C-terminal amidation

SEQ ID NO: 2246 - protein, 41 aa, Artificial Sequence; identical to SEQ ID NO: 2244
  Synthetic peptide
  MISC_FEATURE (2)..(2): Xaa is AIB
  MISC_FEATURE (40)..(40): Covalently bound to a Lys spacer, wherein the Lys spacer is bound to (1) C12-C18 fatty acyl group via an acidic amino acid spacer
  MISC_FEATURE (41)..(41): C-terminal amidation

SEQ ID NO: 2247 - protein, 41 aa, Artificial Sequence
  Synthetic peptide
  MISC_FEATURE (2)..(2): Xaa is AIB
  MISC_FEATURE (40)..(40): Covalently bound to C12-C18 fatty acyl group via side chain hydroxyl of Tyr
  MISC_FEATURE (41)..(41): C-terminal amidation
HXQGTFTSDYSKYLDERAAQDFVQWLLDGGPSSGAPPPSYG

SEQ ID NO: 2248 - protein, 40 aa, Artificial Sequence; identical to SEQ ID NO: 1165
  Synthetic peptide
  MISC_FEATURE: MT-345
  MOD_RES (2)..(2): Xaa is AIB
  MOD_RES (40)..(40): Acylated with a C12-C18 fatty acyl group
  MOD_RES (40)..(40): C-terminal amidation

SEQ ID NO: 2249 - protein, 40 aa, Artificial Sequence
  Synthetic peptide
  MISC_FEATURE: MT-347
  MOD_RES (2)..(2): Xaa is AIB
  MOD_RES (16)..(16): Xaa is AIB
  MOD_RES (40)..(40): Acylated with a C12-C18 fatty acyl group
  MOD_RES (40)..(40): C-terminal amidation
HXQGTFTSDYSKYLDXQAAKEFICWLMNGGPSSGAPPPSK

SEQ ID NO: 2250 - protein, 40 aa, Artificial Sequence; identical to SEQ ID NO: 1165
  Synthetic peptide
  MISC_FEATURE: MT-349
  MOD_RES (2)..(2): Xaa is AIB
  MOD_RES (24)..(24): Covalently bound to 40kDa PEG via thioether made by reaction of peptide with haloacetyl-activated PEG
  MOD_RES (40)..(40): Acylated with a C12-C18 fatty acyl group
  MOD_RES (40)..(40): C-terminal amidation

SEQ ID NO: 2251 - protein, 40 aa, Artificial Sequence; identical to SEQ ID NO: 2249
  Synthetic peptide
  MISC_FEATURE: MT-351
  MOD_RES (2)..(2): Xaa is AIB
  MOD_RES (16)..(16): Xaa is AIB
  MOD_RES (24)..(24): Covalently bound to 40kDa PEG via thioether made by reaction of peptide with haloacetyl-activated PEG
  MOD_RES (40)..(40): Acylated with a C12-C18 fatty acyl group
  MOD_RES (40)..(40): C-terminal amidation

SEQ ID NO: 2252 - protein, 40 aa, Artificial Sequence
  Synthetic peptide
  MISC_FEATURE: MT-364
  MOD_RES (2)..(2): Xaa is AIB
  MOD_RES (40)..(40): Acylated with a C12-C18 fatty acyl group
  MOD_RES (40)..(40): C-terminal amidation
HXQGTFTSDYSKYLDEQAAKEFIAWLMNGGPSSGAPPPSK

SEQ ID NO: 2253 - protein, 39 aa, Artificial Sequence; identical to SEQ ID NO: 1198
  Synthetic peptide
  MISC_FEATURE (2)..(2): Xaa is AIB
  MISC_FEATURE (10)..(10): Xaa is 4-amino-Phe
  MISC_FEATURE (10)..(10): 4-amino-Phe covalently bound a C12-C18 fatty acyl group via spacer comprising two acidic residues
  MISC_FEATURE (20)..(20): Xaa is AIB
  MISC_FEATURE (39)..(39): C-terminal amidation

SEQ ID NO: 2254 - protein, 41 aa, Artificial Sequence; identical to SEQ ID NO: 2193
  Synthetic peptide
  MISC_FEATURE (2)..(2): Xaa is AIB
  MISC_FEATURE (40)..(40): Xaa is 4-amino-Phe
  MISC_FEATURE (40)..(40): 4-amino-Phe covalently bound to a C12-C18 fatty acyl group via spacer comprising two acidic residues
  MISC_FEATURE (41)..(41): C-terminal amidation

SEQ ID NO: 2255 - protein, 39 aa, Artificial Sequence; identical to SEQ ID NO: 2195
  Synthetic peptide
  MISC_FEATURE (2)..(2): Xaa is AIB
  MISC_FEATURE (6)..(6): Xaa is 4-amino-Phe
  MISC_FEATURE (6)..(6): 4-amino-Phe covalently bound to C12-C18 fatty acyl group via spacer comprising acidic residue
  MISC_FEATURE (39)..(39): C-terminal amidation

SEQ ID NO: 2256 - protein, 39 aa, Artificial Sequence; identical to SEQ ID NO: 2196
  Synthetic peptide
  MISC_FEATURE (2)..(2): Xaa is AIB
  MISC_FEATURE (10)..(10): Xaa is 4-amino-Phe
  MISC_FEATURE (10)..(10): 4-amino-Phe covalently bound to a C12-C18 fatty acyl group via spacer comprising acidic residue
  MISC_FEATURE (39)..(39): C-terminal amidation

SEQ ID NO: 2257 - protein, 39 aa, Artificial Sequence; identical to SEQ ID NO: 2197
  Synthetic peptide
  MISC_FEATURE (2)..(2): Xaa is AIB
  MISC_FEATURE (13)..(13): Xaa is 4-amino-Phe
  MISC_FEATURE (13)..(13): 4-amino-Phe covalently bound to a C12-C18 fatty acyl group via spacer comprising acidic residue
  MISC_FEATURE (39)..(39): C-terminal amidation

SEQ ID NO: 2258 - protein, 39 aa, Artificial Sequence; identical to SEQ ID NO: 2199
  Synthetic peptide
  MOD_RES (2)..(2): Xaa is AIB
  MOD_RES (13)..(13): Covalently bound to a C12-C18 fatty acyl group via spacer comprising acidic residue
  MOD_RES (39)..(39): C-terminal amidation

SEQ ID NO: 2259 - protein, 39 aa, Artificial Sequence; identical to SEQ ID NO: 2200
  Synthetic peptide
  MISC_FEATURE (2)..(2): Xaa is AIB
  MISC_FEATURE (14)..(14): Covalently bound to a C12-C18 fatty acyl group via spacer comprising acidic residue
  MISC_FEATURE (39)..(39): C-terminal amidation

SEQ ID NO: 2260 - protein, 39 aa, Artificial Sequence; identical to SEQ ID NO: 2201
  Synthetic peptide
  MISC_FEATURE (2)..(2): Xaa is AIB
  MISC_FEATURE (16)..(16): Covalently bound to a C12-C18 fatty acyl group via spacer comprising acidic residue
  MISC_FEATURE (39)..(39): C-terminal amidation

SEQ ID NO: 2261 - protein, 39 aa, Artificial Sequence; identical to SEQ ID NO: 2202
  Synthetic peptide
  MISC_FEATURE (2)..(2): Xaa is AIB
  MISC_FEATURE (17)..(17): Covalently bound to a C12-C18 fatty acyl group via spacer comprising acidic residue
  MISC_FEATURE (39)..(39): C-terminal amidation

SEQ ID NO: 2262 - protein, 41 aa, Artificial Sequence; identical to SEQ ID NO: 2011
  Synthetic peptide
  MISC_FEATURE (2)..(2): Xaa is AIB
  MISC_FEATURE (40)..(40): Covalently bound to a C12-C18 fatty acyl group via spacer comprising acidic residue
  MISC_FEATURE (41)..(41): C-terminal amidation

SEQ ID NO: 2263 - protein, 41 aa, Artificial Sequence; identical to SEQ ID NO: 2011
  Synthetic peptide
  MISC_FEATURE (2)..(2): Xaa is AIB
  MISC_FEATURE (40)..(40): Covalently bound to a C12-C18 fatty acyl group via a spacer comprising an amido miniPEG acid and an acidic amino acid, wherein the amido miniPEG acid has a structure {-N- CH2- CH2-[-O-CH2-CH2-]n-COO-}, wherein n is 2
  MISC_FEATURE (41)..(41): C-terminal amidation

SEQ ID NO: 2264 - protein, 41 aa, Artificial Sequence; identical to SEQ ID NO: 2011
  Synthetic peptide
  MISC_FEATURE (2)..(2): Xaa is AIB
  MISC_FEATURE (40)..(40): Covalently bound to a C12-C18 fatty acyl group via spacer comprising an amido miniPEG acid and an acidic amino acid, wherein the amido miniPEG acid has a structure {-N- CH2- CH2-[-O-CH2-CH2-]n-COO-}, wherein n is 4
  MISC_FEATURE (41)..(41): C-terminal amidation

SEQ ID NO: 2265 - protein, 41 aa, Artificial Sequence; identical to SEQ ID NO: 2011
  Synthetic peptide
  MISC_FEATURE (2)..(2): Xaa is AIB
  MISC_FEATURE (40)..(40): Covalently bound to a C12-C18 fatty acyl group via spacer comprising an amido miniPEG acid and an acidic amino acid, wherein the amido miniPEG acid has a structure {-N- CH2- CH2-[-O-CH2-CH2-]n-COO-}, wherein n is 8
  MISC_FEATURE (41)..(41): C-terminal amidation

SEQ ID NO: 2266 - protein, 39 aa, Artificial Sequence; identical to SEQ ID NO: 2010
  Synthetic peptide
  MISC_FEATURE (2)..(2): Xaa is AIB
  MISC_FEATURE (10)..(10): Covalently bound to a Lys spacer, wherein the Lys spacer is attached to two C12-C18 fatty acyl groups, wherein each C12-C18 fatty acyl group is attached to the Lys spacer via spacer comprising an acidic residue
  MISC_FEATURE (39)..(39): C-terminal amidation

SEQ ID NO: 2267 - protein, 40 aa, Artificial Sequence; identical to SEQ ID NO: 2209
  Synthetic peptide
  MISC_FEATURE (2)..(2): Xaa is AIB
  MISC_FEATURE (40)..(40): Covalently bound to a Lys spacer, wherein the Lys spacer is attached to two C12-C18 fatty acyl groups, wherein each C12-C18 fatty acyl group is attached to the Lys spacer via spacer comprising an acidic residue
  MISC_FEATURE (40)..(40): C-terminal amidation

SEQ ID NO: 2268 - protein, 39 aa, Artificial Sequence; identical to SEQ ID NO: 2010
  Synthetic peptide
  MISC_FEATURE (2)..(2): Xaa is AIB
  MISC_FEATURE (10)..(10): Covalently bound to a C12-C18 fatty acyl group, which is covalently bound to a spacer comprising an acidic residue, which is covalently bound to a C12-C18 fatty acyl group
  MISC_FEATURE (39)..(39): C-terminal amidation

SEQ ID NO: 2269 - protein, 40 aa, Artificial Sequence; identical to SEQ ID NO: 2211
  Synthetic peptide
  MISC_FEATURE (2)..(2): Xaa is AIB
  MISC_FEATURE (10)..(10): Covalently bound to a C12-C18 fatty acyl group via acidic amino acid spacer
  MISC_FEATURE (40)..(40): Covalently bound to a C12-C18 fatty acyl group via spacer comprising an acidic residue
  MISC_FEATURE (40)..(40): C-terminal amidation

SEQ ID NO: 2270 - protein, 41 aa, Artificial Sequence; identical to SEQ ID NO: 2011
  Synthetic peptide
  MISC_FEATURE (2)..(2): Xaa is AIB
  MISC_FEATURE (40)..(40): Covalently bound to Cys, which is covalently bound to an acidic residue, which is covalently bound to a C12-C18 fatty acyl group
  MISC_FEATURE (41)..(41): C-terminal amidation

SEQ ID NO: 2271 - protein, 41 aa, Artificial Sequence; identical to SEQ ID NO: 2011
  Synthetic peptide
  MISC_FEATURE (2)..(2): Xaa is AIB
  MISC_FEATURE (40)..(40): Covalently bound to Cys spacer, which is bound to an acidic residue, which is bound to a C12-C18 fatty acyl group
  MISC_FEATURE (40)..(40): Covalently bound to SEQ ID 270 via Cys spacer which is disulfide bonded to a 2nd Cys, which the 2nd Cys is bound to Lys at position 40 of SEQ ID 270 and is bound to an acidic residue, which, in turn is bound to a C12-C18 fatty acyl group
  MISC_FEATURE (41)..(41): C-terminal amidation

SEQ ID NO: 2272 - protein, 41 aa, Artificial Sequence; identical to SEQ ID NO: 2011
  Synthetic peptide
  MISC_FEATURE (2)..(2): Xaa is AIB
  MISC_FEATURE (40)..(40): Covalently bound to Cys, which is bound to an acidic residue, which is bound to a C12-C18 fatty acyl group and the sulfer of the Cys is thioether linked to a peptide of SEQ ID NO: 282 via Lys at position 40
  MISC_FEATURE (41)..(41): C-terminal amidation

SEQ ID NO: 2273 - protein, 41 aa, Artificial Sequence; identical to SEQ ID NO: 2011
  Synthetic peptide
  MISC_FEATURE (2)..(2): Xaa is AIB
  MISC_FEATURE (40)..(40): Covalently bound to Cys, which is bound to an acidic residue, which is bound to a C12-C18 fatty acyl group, and the sulfur of the Cys is disulfide bonded to a 2nd Cys, which the 2nd Cys is bound to a peptide of SEQ ID NO: 282 via Lys at position 40
  MISC_FEATURE (41)..(41): C-terminal amidation

SEQ ID NO: 2274 - protein, 41 aa, Artificial Sequence; identical to SEQ ID NO: 2216
  Synthetic peptide
  MISC_FEATURE (2)..(2): Xaa is AIB
  MISC_FEATURE (40)..(40): Covalently bound to a C12-C18 fatty acyl group via spacer comprising two acidic residues
  MISC_FEATURE (41)..(41): C-terminal amidation

SEQ ID NO: 2275 - protein, 41 aa, Artificial Sequence; identical to SEQ ID NO: 2011
  Synthetic peptide
  MISC_FEATURE (2)..(2): Xaa is AIB
  MISC_FEATURE (40)..(40): Covalently bound to a C12-C18 fatty acyl group via spacer comprising two acidic residues
  MISC_FEATURE (41)..(41): C-terminal amidation

SEQ ID NO: 2276 - protein, 41 aa, Artificial Sequence; identical to SEQ ID NO: 2051
  Synthetic peptide
  MISC_FEATURE (2)..(2): Xaa is AIB
  MISC_FEATURE (40)..(40): Covalently bound to a C12-C18 fatty acyl group via spacer comprising two acidic residues
  MISC_FEATURE (41)..(41): C-terminal amidation

SEQ ID NO: 2277 - protein, 41 aa, Artificial Sequence; identical to SEQ ID NO: 2052
  Synthetic peptide
  MISC_FEATURE (2)..(2): Xaa is AIB
  MISC_FEATURE (40)..(40): Covalently bound to a C12-C18 fatty acyl group via spacer comprising two acidic residues
  MISC_FEATURE (41)..(41): C-terminal amidation

SEQ ID NO: 2278 - protein, 40 aa, Artificial Sequence; identical to SEQ ID NO: 2241
  Synthetic peptide
  MISC_FEATURE (2)..(2): Xaa is AIB
  MISC_FEATURE (10)..(10): Covalently bound to a C12-C18 fatty acyl group via spacer comprising an acidic residue
  MISC_FEATURE (40)..(40): C-terminal amidation

SEQ ID NO: 2279 - protein, 39 aa, Artificial Sequence; identical to SEQ ID NO: 2242
  Synthetic peptide
  MISC_FEATURE (2)..(2): Xaa is AIB
  MISC_FEATURE (10)..(10): Covalently bound to a C12-C18 fatty acyl group via spacer comprising an acidic residue
  MISC_FEATURE (39)..(39): C-terminal amidation

SEQ ID NO: 2280 - protein, 40 aa, Artificial Sequence; identical to SEQ ID NO: 2241
  Synthetic peptide
  MISC_FEATURE (2)..(2): Xaa is AIB
  MISC_FEATURE (10)..(10): Covalently bound to a C12-C18 fatty acyl group via spacer comprising two acidic residues
  MISC_FEATURE (40)..(40): C-terminal amidation

SEQ ID NO: 2281 - protein, 41 aa, Artificial Sequence; identical to SEQ ID NO: 2244
  Synthetic peptide
  MISC_FEATURE (2)..(2): Xaa is AIB
  MISC_FEATURE (40)..(40): Covalently bound to Lys spacer, wherein Lys spacer is bound via the alpha amine to an acidic residue spacer, which is bound to C12-C18 fatty acyl group and Lys spacer is bound via epsilon amine to an acidic residue which is bound to C12-C18 fatty acyl
  MISC_FEATURE (41)..(41): C-terminal amidation

SEQ ID NO: 2282 - protein, 41 aa, Artificial Sequence; identical to SEQ ID NO: 2011
  Synthetic peptide
  MISC_FEATURE (2)..(2): Xaa is AIB
  MISC_FEATURE (41)..(41): C-terminal amidation

SEQ ID NO: 2283 - protein, 41 aa, Artificial Sequence; identical to SEQ ID NO: 2015
  Synthetic peptide
  MISC_FEATURE (2)..(2): Xaa is AIB
  MISC_FEATURE (40)..(40): Covalently bound to a C12-C18 fatty acyl group via dipeptide spacer
  MISC_FEATURE (41)..(41): C-terminal amidation

SEQ ID NO: 2284 - protein, 41 aa, Artificial Sequence; identical to SEQ ID NO: 2016
  Synthetic peptide
  MISC_FEATURE (2)..(2): Xaa is AIB
  MISC_FEATURE (40)..(40): Covalently bound to a C12-C18 fatty acyl group via dipeptide spacer
  MISC_FEATURE (41)..(41): C-terminal amidation

SEQ ID NO: 2285 - protein, 41 aa, Artificial Sequence; identical to SEQ ID NO: 2017
  Synthetic peptide
  MISC_FEATURE (2)..(2): Xaa is AIB
  MISC_FEATURE (40)..(40): Covalently bound to a C12-C18 fatty acyl group via dipeptide spacer
  MISC_FEATURE (41)..(41): C-terminal amidation

SEQ ID NO: 2286 - protein, 39 aa, Artificial Sequence
  Synthetic peptide
  MISC_FEATURE (2)..(2): Xaa is AIB
  MISC_FEATURE (10)..(10): Covalently bound to a C12-C18 fatty acyl group via acidic amino acid spacer
  MISC_FEATURE (39)..(39): C-terminal amidation
HXQGTFTSDKSKYLEERRAQEFVQWLLEGGPSSGAPPPS

SEQ ID NO: 2287 - protein, 39 aa, Artificial Sequence; identical to SEQ ID NO: 2019
  Synthetic peptide
  MISC_FEATURE (2)..(2): Xaa is AIB
  MISC_FEATURE (10)..(10): Covalently bound to a C12-C18 fatty acyl group via acidic amino acid spacer
  MISC_FEATURE (39)..(39): C-terminal amidation

SEQ ID NO: 2288 - protein, 39 aa, Artificial Sequence; identical to SEQ ID NO: 2020
  Synthetic peptide
  MOD_RES (2)..(2): Xaa is AIB
  MOD_RES (10)..(10): Covalently bound to a C12-C18 fatty acyl group via acidic amino acid spacer
  MOD_RES (39)..(39): C-terminal amidation

SEQ ID NO: 2289 - protein, 39 aa, Artificial Sequence; identical to SEQ ID NO: 2021
  Synthetic peptide
  MISC_FEATURE (2)..(2): Xaa is AIB
  MISC_FEATURE (10)..(10): Covalently bound to a C12-C18 fatty acyl group via acidic amino acid spacer
  MISC_FEATURE (20)..(20): Xaa is AIB
  MISC_FEATURE (39)..(39): C-terminal amidation

SEQ ID NO: 2290 - protein, 39 aa, Artificial Sequence; identical to SEQ ID NO: 2022
  Synthetic peptide
  MISC_FEATURE (2)..(2): Xaa is AIB
  MISC_FEATURE (10)..(10): Covalently bound to a C12-C18 fatty acyl group via acidic amino acid spacer
  MISC_FEATURE (20)..(20): Xaa is AIB
  MISC_FEATURE (39)..(39): C-terminal amidation

SEQ ID NO: 2291 - protein, 39 aa, Artificial Sequence; identical to SEQ ID NO: 2023
  Synthetic peptide
  MISC_FEATURE (2)..(2): Xaa is AIB
  MISC_FEATURE (10)..(10): Covalently bound to a C12-C18 fatty acyl group via acidic amino acid spacer
  MISC_FEATURE (19)..(19): Xaa is AIB
  MISC_FEATURE (39)..(39): C-terminal amidation

SEQ ID NO: 2292 - protein, 39 aa, Artificial Sequence; identical to SEQ ID NO: 2024
  Synthetic peptide
  MISC_FEATURE (2)..(2): Xaa is AIB
  MISC_FEATURE (10)..(10): Covalently bound to a C12-C18 fatty acyl group via acidic amino acid spacer
  MISC_FEATURE (16)..(16): Xaa is AIB
  MISC_FEATURE (20)..(20): Xaa is AIB
  MISC_FEATURE (39)..(39): C-terminal amidation

SEQ ID NO: 2293 - protein, 39 aa, Artificial Sequence; identical to SEQ ID NO: 2025
  Synthetic peptide
  MISC_FEATURE (2)..(2): Xaa is AIB
  MISC_FEATURE (10)..(10): Covalently bound to a C12-C18 fatty acyl group via acidic amino acid spacer
  MISC_FEATURE (20)..(20): Xaa is AIB
  MISC_FEATURE (39)..(39): C-terminal amidation

SEQ ID NO: 2294 - protein, 39 aa, Artificial Sequence; identical to SEQ ID NO: 2026
  Synthetic peptide
  MISC_FEATURE (2)..(2): Xaa is AIB
  MISC_FEATURE (10)..(10): Covalently bound to a C12-C18 fatty acyl group via acidic amino acid spacer
  MISC_FEATURE (20)..(20): Xaa is AIB
  MISC_FEATURE (39)..(39): C-terminal amidation

SEQ ID NO: 2295 - protein, 39 aa, Artificial Sequence; identical to SEQ ID NO: 2027
  Synthetic peptide
  MISC_FEATURE (2)..(2): Xaa is AIB
  MISC_FEATURE (10)..(10): Covalently bound to a C12-C18 fatty acyl group via acidic amino acid spacer
  MISC_FEATURE (19)..(19): Xaa is AIB
  MISC_FEATURE (39)..(39): C-terminal amidation

SEQ ID NO: 2296 - protein, 39 aa, Artificial Sequence; identical to SEQ ID NO: 2028
  Synthetic peptide
  MISC_FEATURE (2)..(2): Xaa is AIB
  MISC_FEATURE (10)..(10): Covalently bound to a C12-C18 fatty acyl group via acidic amino acid spacer
  MISC_FEATURE (20)..(20): Xaa is AIB
  MISC_FEATURE (39)..(39): C-terminal amidation

SEQ ID NO: 2297 - protein, 39 aa, Artificial Sequence; identical to SEQ ID NO: 2029
  Synthetic peptide
  MISC_FEATURE (2)..(2): Xaa is AIB
  MISC_FEATURE (10)..(10): Covalently bound to a C12-C18 fatty acyl group via acidic amino acid spacer
  MISC_FEATURE (39)..(39): C-terminal amidation

SEQ ID NO: 2298 - protein, 39 aa, Artificial Sequence; identical to SEQ ID NO: 2030
  Synthetic peptide
  MISC_FEATURE (2)..(2): Xaa is AIB
  MISC_FEATURE (10)..(10): Covalently bound to a C12-C18 fatty acyl group via acidic amino acid spacer
  MISC_FEATURE (39)..(39): C-terminal amidation

SEQ ID NO: 2299 - protein, 39 aa, Artificial Sequence; identical to SEQ ID NO: 2031
  Synthetic peptide
  MISC_FEATURE (2)..(2): Xaa is AIB
  MISC_FEATURE (10)..(10): Covalently bound to a C12-C18 fatty acyl group via acidic amino acid spacer
  MISC_FEATURE (39)..(39): C-terminal amidation

SEQ ID NO: 2300 - protein, 39 aa, Artificial Sequence; identical to SEQ ID NO: 2032
  Synthetic peptide
  MISC_FEATURE (2)..(2): Xaa is AIB
  MISC_FEATURE (10)..(10): Covalently bound to a C12-C18 fatty acyl group via acidic amino acid spacer
  MISC_FEATURE (39)..(39): C-terminal amidation

SEQ ID NO: 2301 - protein, 39 aa, Artificial Sequence; identical to SEQ ID NO: 2033
  Synthetic peptide
  MISC_FEATURE (2)..(2): Xaa is AIB
  MISC_FEATURE (3)..(3): Xaa is Homoserine
  MISC_FEATURE (10)..(10): Covalently bound to a C12-C18 fatty acyl group via acidic amino acid spacer
  MISC_FEATURE (39)..(39): C-terminal amidation

SEQ ID NO: 2302 - protein, 39 aa, Artificial Sequence; identical to SEQ ID NO: 2033
  Synthetic peptide
  MISC_FEATURE (2)..(2): Xaa is AIB
  MISC_FEATURE (3)..(3): Xaa is acetyl ornithine
  MISC_FEATURE (10)..(10): Covalently bound to a C12-C18 fatty acyl group via acidic amino acid spacer
  MISC_FEATURE (39)..(39): C-terminal amidation

SEQ ID NO: 2303 - protein, 39 aa, Artificial Sequence; identical to SEQ ID NO: 2035
  Synthetic peptide
  MISC_FEATURE (2)..(2): Xaa is AIB
  MISC_FEATURE (10)..(10): Covalently bound to a C12-C18 fatty acyl group via acidic amino acid spacer
  MISC_FEATURE (39)..(39): C-terminal amidation

SEQ ID NO: 2304 - protein, 39 aa, Artificial Sequence; identical to SEQ ID NO: 2033
  Synthetic peptide
  MISC_FEATURE (2)..(2): Xaa is AIB
  MISC_FEATURE (3)..(3): Xaa is acetyl diaminobutanoic acid
  MISC_FEATURE (10)..(10): Covalently bound to a C12-C18 fatty acyl group via acidic amino acid spacer
  MISC_FEATURE (39)..(39): C-terminal amidation

SEQ ID NO: 2305 - protein, 39 aa, Artificial Sequence; identical to SEQ ID NO: 2037
  Synthetic peptide
  MISC_FEATURE (2)..(2): Xaa is AIB
  MISC_FEATURE (10)..(10): Covalently bound to a C12-C18 fatty acyl group via acidic amino acid spacer
  MISC_FEATURE (39)..(39): C-terminal amidation

SEQ ID NO: 2306 - protein, 39 aa, Artificial Sequence; identical to SEQ ID NO: 2033
  Synthetic peptide
  MISC_FEATURE (2)..(2): Xaa is AIB
  MISC_FEATURE (3)..(3): Xaa is norvaline
  MISC_FEATURE (10)..(10): Covalently bound to a C12-C18 fatty acyl group via acidic amino acid spacer
  MISC_FEATURE (39)..(39): C-terminal amidation

SEQ ID NO: 2307 - protein, 39 aa, Artificial Sequence; identical to SEQ ID NO: 2033
  Synthetic peptide
  MISC_FEATURE (2)..(2): Xaa is AIB
  MISC_FEATURE (3)..(3): Xaa is acetyl lysine
  MISC_FEATURE (10)..(10): Covalently bound to a C12-C18 fatty acyl group via acidic amino acid spacer
  MISC_FEATURE (39)..(39): C-terminal amidation

SEQ ID NO: 2308 - protein, 39 aa, Artificial Sequence; identical to SEQ ID NO: 2033
  Synthetic peptide
  MISC_FEATURE (2)..(2): Xaa is AIB
  MISC_FEATURE (3)..(3): Xaa is norleucine
  MISC_FEATURE (10)..(10): Covalently bound to a C12-C18 fatty acyl group via acidic amino acid spacer
  MISC_FEATURE (39)..(39): C-terminal amidation

SEQ ID NO: 2309 - protein, 39 aa, Artificial Sequence; identical to SEQ ID NO: 2033
  Synthetic peptide
  MISC_FEATURE (2)..(2): Xaa is AIB
  MISC_FEATURE (3)..(3): Xaa is methionine sulfone
  MISC_FEATURE (10)..(10): Covalently bound to a C12-C18 fatty acyl group via acidic amino acid spacer
  MISC_FEATURE (39)..(39): C-terminal amidation

SEQ ID NO: 2310 - protein, 39 aa, Artificial Sequence; identical to SEQ ID NO: 2033
  Synthetic peptide
  MISC_FEATURE (2)..(2): Xaa is AIB
  MISC_FEATURE (3)..(3): Xaa is methionine sulfoxide
  MISC_FEATURE (10)..(10): Covalently bound to a C12-C18 fatty acyl group via acidic amino acid spacer
  MISC_FEATURE (39)..(39): C-terminal amidation

SEQ ID NO: 2311 - protein, 39 aa, Artificial Sequence; identical to SEQ ID NO: 2043
  Synthetic peptide
  MISC_FEATURE (2)..(2): Xaa is AIB
  MISC_FEATURE (10)..(10): Covalently bound to a C12-C18 fatty acyl group via acidic amino acid spacer
  MISC_FEATURE (39)..(39): C-terminal amidation

SEQ ID NO: 2312 - protein, 39 aa, Artificial Sequence; identical to SEQ ID NO: 2044
  Synthetic peptide
  MISC_FEATURE (2)..(2): Xaa is AIB
  MISC_FEATURE (10)..(10): Covalently bound to a C12-C18 fatty acyl group via acidic amino acid spacer
  MISC_FEATURE (39)..(39): C-terminal amidation

SEQ ID NO: 2313 - protein, 39 aa, Artificial Sequence; identical to SEQ ID NO: 2045
  Synthetic peptide
  MISC_FEATURE (2)..(2): Xaa is AIB
  MISC_FEATURE (10)..(10): Covalently bound to a C12-C18 fatty acyl group via acidic amino acid spacer
  MISC_FEATURE (39)..(39): C-terminal amidation

SEQ ID NO: 2314 - protein, 39 aa, Artificial Sequence; identical to SEQ ID NO: 2046
  Synthetic peptide
  MISC_FEATURE (2)..(2): Xaa is AIB
  MISC_FEATURE (3)..(3): Xaa is methionine sulfoxide
  MISC_FEATURE (10)..(10): Covalently bound to a C12-C18 fatty acyl group via acidic amino acid spacer
  MISC_FEATURE (39)..(39): C-terminal amidation

SEQ ID NO: 2315 - protein, 39 aa, Artificial Sequence; identical to SEQ ID NO: 2046
  Synthetic peptide
  MISC_FEATURE (2)..(2): Xaa is AIB
  MISC_FEATURE (3)..(3): Xaa is norvaline
  MISC_FEATURE (10)..(10): Covalently bound to a C12-C18 fatty acyl group via acidic amino acid spacer
  MISC_FEATURE (39)..(39): C-terminal amidation

SEQ ID NO: 2316 - protein, 39 aa, Artificial Sequence; identical to SEQ ID NO: 2046
  Synthetic peptide
  MISC_FEATURE (2)..(2): Xaa is AIB
  MISC_FEATURE (3)..(3): Xaa is homoserine
  MISC_FEATURE (10)..(10): Covalently bound to a C12-C18 fatty acyl group via acidic amino acid spacer
  MISC_FEATURE (39)..(39): C-terminal amidation

SEQ ID NO: 2317 - protein, 41 aa, Artificial Sequence; identical to SEQ ID NO: 2049
  Synthetic peptide
  MISC_FEATURE (2)..(2): Xaa is AIB
  MISC_FEATURE (40)..(40): Covalently bound to a C12-C18 fatty acyl group via dipeptide spacer
  MISC_FEATURE (41)..(41): C-terminal amidation

SEQ ID NO: 2318 - protein, 41 aa, Artificial Sequence; identical to SEQ ID NO: 2050
  Synthetic peptide
  MISC_FEATURE (2)..(2): Xaa is AIB
  MISC_FEATURE (40)..(40): Covalently bound to a C12-C18 fatty acyl group via dipeptide spacer
  MISC_FEATURE (41)..(41): C-terminal amidation

SEQ ID NO: 2319 - protein, 41 aa, Artificial Sequence; identical to SEQ ID NO: 2051
  Synthetic peptide
  MISC_FEATURE (2)..(2): Xaa is AIB
  MISC_FEATURE (40)..(40): Covalently bound to a C12-C18 fatty acyl group via dipeptide spacer
  MISC_FEATURE (41)..(41): C-terminal amidation

SEQ ID NO: 2320 - protein, 41 aa, Artificial Sequence; identical to SEQ ID NO: 2052
  Synthetic peptide
  MISC_FEATURE (2)..(2): Xaa is AIB
  MISC_FEATURE (40)..(40): Covalently bound to a C12-C18 fatty acyl group via dipeptide spacer
  MISC_FEATURE (41)..(41): C-terminal amidation

SEQ ID NO: 2321 - protein, 41 aa, Artificial Sequence; identical to SEQ ID NO: 2053
  Synthetic peptide
  MISC_FEATURE (2)..(2): Xaa is AIB
  MISC_FEATURE (40)..(40): Covalently bound to a C12-C18 fatty acyl group via dipeptide spacer
  MISC_FEATURE (41)..(41): C-terminal amidation

SEQ ID NO: 2322 - protein, 41 aa, Artificial Sequence; identical to SEQ ID NO: 2054
  Synthetic peptide
  MISC_FEATURE (2)..(2): Xaa is AIB
  MISC_FEATURE (40)..(40): Covalently bound to a C12-C18 fatty acyl group via dipeptide spacer
  MISC_FEATURE (41)..(41): C-terminal amidation

SEQ ID NO: 2323 - protein, 41 aa, Artificial Sequence; identical to SEQ ID NO: 2055
  Synthetic peptide
  MISC_FEATURE (2)..(2): Xaa is AIB
  MISC_FEATURE (40)..(40): Covalently bound to a C12-C18 fatty acyl group via dipeptide spacer
  MISC_FEATURE (41)..(41): C-terminal amidation

SEQ ID NO: 2324 - protein, 41 aa, Artificial Sequence; identical to SEQ ID NO: 2056
  Synthetic peptide
  MISC_FEATURE (2)..(2): Xaa is AIB
  MISC_FEATURE (40)..(40): Covalently bound to a C12-C18 fatty acyl group via dipeptide spacer
  MISC_FEATURE (41)..(41): C-terminal amidation

SEQ ID NO: 2325 - protein, 41 aa, Artificial Sequence; identical to SEQ ID NO: 2057
  Synthetic peptide
  MISC_FEATURE (2)..(2): Xaa is AIB
  MISC_FEATURE (40)..(40): Covalently bound to a C12-C18 fatty acyl group via dipeptide spacer
  MISC_FEATURE (41)..(41): C-terminal amidation

SEQ ID NO: 2326 - protein, 41 aa, Artificial Sequence; identical to SEQ ID NO: 2058
  Synthetic peptide
  MISC_FEATURE (2)..(2): Xaa is AIB
  MISC_FEATURE (40)..(40): Covalently bound to a C12-C18 fatty acyl group via dipeptide spacer
  MISC_FEATURE (41)..(41): C-terminal amidation

SEQ ID NO: 2327 - protein, 41 aa, Artificial Sequence; identical to SEQ ID NO: 2059
  Synthetic peptide
  MISC_FEATURE (2)..(2): Xaa is AIB
  MISC_FEATURE (40)..(40): Covalently bound to a C12-C18 fatty acyl group via dipeptide spacer
  MISC_FEATURE (41)..(41): C-terminal amidation

SEQ ID NO: 2328 - protein, 41 aa, Artificial Sequence; identical to SEQ ID NO: 2060
  Synthetic peptide
  MISC_FEATURE (2)..(2): Xaa is AIB
  MISC_FEATURE (40)..(40): Covalently bound to a C12-C18 fatty acyl group via dipeptide spacer
  MISC_FEATURE (41)..(41): C-terminal amidation

SEQ ID NO: 2329 - protein, 41 aa, Artificial Sequence; identical to SEQ ID NO: 2061
  Synthetic peptide
  MISC_FEATURE (2)..(2): Xaa is AIB
  MISC_FEATURE (40)..(40): Covalently bound to a C12-C18 fatty acyl group via dipeptide spacer
  MISC_FEATURE (41)..(41): C-terminal amidation

SEQ ID NO: 2330 - protein, 39 aa, Artificial Sequence; identical to SEQ ID NO: 2063
  Synthetic peptide
  MISC_FEATURE (2)..(2): Xaa is AIB
  MISC_FEATURE (10)..(10): Covalently bound to a C12-C18 fatty acyl group via acidic amino acid spacer
  MISC_FEATURE (39)..(39): C-terminal amidation

SEQ ID NO: 2331 - protein, 39 aa, Artificial Sequence; identical to SEQ ID NO: 2064
  Synthetic peptide
  MISC_FEATURE (2)..(2): Xaa is AIB
  MISC_FEATURE (10)..(10): Covalently bound to a C12-C18 fatty acyl group via acidic amino acid spacer
  MISC_FEATURE (39)..(39): C-terminal amidation

SEQ ID NO: 2332 - protein, 39 aa, Artificial Sequence; identical to SEQ ID NO: 2065
  Synthetic peptide
  MISC_FEATURE (2)..(2): Xaa is AIB
  MISC_FEATURE (10)..(10): Covalently bound to a C12-C18 fatty acyl group via acidic amino acid spacer
  MISC_FEATURE (29)..(29): Xaa is AIB
  MISC_FEATURE (39)..(39): C-terminal amidation

SEQ ID NO: 2333 - protein, 39 aa, Artificial Sequence; identical to SEQ ID NO: 2100
  Synthetic peptide
  MISC_FEATURE: Analog #29
  MISC_FEATURE (2)..(2): d-Ser
  MISC_FEATURE (10)..(10): Acylated or alkylated, optionally, via a spacer
  MISC_FEATURE (39)..(39): C-terminal amidation

SEQ ID NO: 2334 - protein, 39 aa, Artificial Sequence; identical to SEQ ID NO: 2010
  Synthetic peptide
  MISC_FEATURE: Analog #30
  MISC_FEATURE (2)..(2): Xaa is AIB
  MISC_FEATURE (10)..(10): Acylated or alkylated, optionally, via a spacer
  MISC_FEATURE (39)..(39): C-terminal amidation

SEQ ID NO: 2335 - protein, 31 aa, Artificial Sequence; identical to SEQ ID NO: 2102
  Synthetic peptide
  MISC_FEATURE: Analog #34
  MISC_FEATURE (2)..(2): Xaa is AIB
  MISC_FEATURE (10)..(10): Acylated or alkylated, optionally, via a spacer
  MISC_FEATURE (31)..(31): C-terminal amidation

SEQ ID NO: 2336 - protein, 29 aa, Artificial Sequence
  Synthetic peptide
  MISC_FEATURE: Analog #36
  MISC_FEATURE (2)..(2): d-Ser
  MISC_FEATURE (10)..(10): Acylated or alkylated, optionally, via a spacer
  MISC_FEATURE (20)..(20): Xaa is AIB
  MISC_FEATURE (29)..(29): C-terminal amidation
HSQGTFTSDKSKYLDERRAXEFVQWLLDT

SEQ ID NO: 2337 - protein, 29 aa, Artificial Sequence
  Synthetic peptide
  MISC_FEATURE: Analog #37
  MISC_FEATURE (2)..(2): Xaa is AIB
  MISC_FEATURE (10)..(10): Acylated or alkylated, optionally, via a spacer
  MISC_FEATURE (20)..(20): Xaa is AIB
  MISC_FEATURE (29)..(29): C-terminal amidation
HXQGTFTSDKSKYLDERRAXEFVQWLLDT

SEQ ID NO: 2338 - protein, 29 aa, Artificial Sequence
  Synthetic peptide
  MISC_FEATURE: Analog #44
  MISC_FEATURE (1)..(1): Xaa is alpha-dimethyl imidiazole acetic acid (DMIA)
  MISC_FEATURE (2)..(2): d-Ser
  MISC_FEATURE (10)..(10): Acylated or alkylated, optionally, via a spacer
  MISC_FEATURE (29)..(29): C-terminal amidation
XSQGTFTSDKSKYLDERAAQDFVQWLLDT

SEQ ID NO: 2339 - protein, 39 aa, Artificial Sequence; identical to SEQ ID NO: 2106
  Synthetic peptide
  MISC_FEATURE: Analog #49
  MISC_FEATURE (2)..(2): Xaa is AIB
  MISC_FEATURE (10)..(10): Acylated or alkylated, optionally, via a spacer
  MISC_FEATURE (16)..(16): Xaa is AIB
  MISC_FEATURE (39)..(39): C-terminal amidation

SEQ ID NO: 2340 - protein, 39 aa, Artificial Sequence; identical to SEQ ID NO: 2107
  Synthetic peptide
  MISC_FEATURE: Analog #53
  MISC_FEATURE (2)..(2): Xaa is AIB
  MISC_FEATURE (10)..(10): Acylated or alkylated, optionally, via a spacer
  MISC_FEATURE (16)..(16): Xaa is AIB
  MISC_FEATURE (39)..(39): C-terminal amidation

SEQ ID NO: 2341 - protein, 39 aa, Artificial Sequence; identical to SEQ ID NO: 2108
  Synthetic peptide
  MISC_FEATURE: Analog #54
  misc_feature (2)..(2): Xaa can be any naturally occurring amino acid
  MISC_FEATURE (10)..(10): Acylated or alkylated, optionally, via a spacer
  MISC_FEATURE (16)..(16): Xaa is AIB
  MISC_FEATURE (39)..(39): C-terminal amidation

SEQ ID NO: 2342 - protein, 39 aa, Artificial Sequence; identical to SEQ ID NO: 2109
  Synthetic peptide
  MISC_FEATURE: Analog #61
  MISC_FEATURE (2)..(2): Xaa is AIB
  MISC_FEATURE (10)..(10): Acylated or alkylated, optionally, via a spacer
  MISC_FEATURE (20)..(20): Xaa is AIB
  MISC_FEATURE (39)..(39): C-terminal amidation

SEQ ID NO: 2343 - protein, 39 aa, Artificial Sequence; identical to SEQ ID NO: 2110
  Synthetic peptide
  MISC_FEATURE: Analog #62
  MISC_FEATURE (2)..(2): Xaa is AIB
  MISC_FEATURE (10)..(10): Acylated or alkylated, optionally, via a spacer
  MISC_FEATURE (20)..(20): Xaa is AIB
  MISC_FEATURE (39)..(39): C-terminal amidation

SEQ ID NO: 2344 - protein, 39 aa, Artificial Sequence; identical to SEQ ID NO: 2012
  Synthetic peptide
  MISC_FEATURE: Analog #63
  MISC_FEATURE (2)..(2): Xaa is AIB
  MISC_FEATURE (10)..(10): Acylated or alkylated, optionally, via a spacer
  MISC_FEATURE (39)..(39): C-terminal amidation

SEQ ID NO: 2345 - protein, 29 aa, Artificial Sequence
  Synthetic peptide
  MISC_FEATURE: Analog #64
  MISC_FEATURE (2)..(2): Xaa is AIB
  MISC_FEATURE (10)..(10): Acylated or alkylated, optionally, via a spacer
  MISC_FEATURE (20)..(20): Xaa is AIB
  MISC_FEATURE (29)..(29): C-terminal amidation
HXEGTFTSDKSKYLDERRAXEFVQWLLDT

SEQ ID NO: 2346 - protein, 39 aa, Artificial Sequence; identical to SEQ ID NO: 2113
  Synthetic peptide
  MISC_FEATURE: Analog #65
  MISC_FEATURE (2)..(2): Xaa is AIB
  MISC_FEATURE (10)..(10): Acylated or alkylated, optionally, via a spacer
  MISC_FEATURE (20)..(20): Xaa is AIB
  MISC_FEATURE (39)..(39): C-terminal amidation

SEQ ID NO: 2347 - protein, 29 aa, Artificial Sequence
  Synthetic peptide
  MISC_FEATURE (2)..(2): Xaa is AIB
  MISC_FEATURE (9)..(9): Acylated or alkylated, optionally, via a spacer
  MISC_FEATURE (16)..(16): Xaa is AIB
  MISC_FEATURE (29)..(29): C-terminal amidation
HXQGTFTSKYSKYLDXRRAQDFVQWLMNT

SEQ ID NO: 2348 - protein, 29 aa, Artificial Sequence
  Synthetic peptide
  MISC_FEATURE (2)..(2): Xaa is AIB
  MISC_FEATURE (10)..(10): Acylated or alkylated, optionally, via a spacer
  MISC_FEATURE (16)..(16): Xaa is AIB
  MISC_FEATURE (29)..(29): C-terminal amidation
HXQGTFTSDKSKYLDXRRAQDFVQWLMNT

SEQ ID NO: 2349 - protein, 29 aa, Artificial Sequence
  Synthetic peptide
  MISC_FEATURE (2)..(2): Xaa is AIB
  MISC_FEATURE (12)..(12): Acylated or alkylated, optionally, via a spacer
  MISC_FEATURE (16)..(16): Xaa is AIB
  MISC_FEATURE (29)..(29): C-terminal amidation
HXQGTFTSDYSKYLDXRRAQDFVQWLMNT

SEQ ID NO: 2350 - protein, 29 aa, Artificial Sequence
  Synthetic peptide
  MISC_FEATURE (2)..(2): Xaa is AIB
  MISC_FEATURE (16)..(16): Acylated or alkylated, optionally, via a spacer
  MISC_FEATURE (29)..(29): C-terminal amidation
HXQGTFTSDYSKYLDKRRAQDFVQWLMNT

SEQ ID NO: 2351 - protein, 29 aa, Artificial Sequence
  Synthetic peptide
  MISC_FEATURE (2)..(2): Xaa is AIB
  MISC_FEATURE (16)..(16): Xaa is AIB
  MISC_FEATURE (20)..(20): Acylated or alkylated, optionally, via a spacer
  MISC_FEATURE (29)..(29): C-terminal amidation
HXQGTFTSDYSKYLDXRRAKDFVQWLMNT

SEQ ID NO: 2352 - protein, 39 aa, Artificial Sequence; identical to SEQ ID NO: 2119
  Synthetic peptide
  MISC_FEATURE (2)..(2): Xaa is AIB
  MISC_FEATURE (10)..(10): Acylated or alkylated, optionally, via a spacer
  MISC_FEATURE (20)..(20): Xaa is AIB
  MISC_FEATURE (39)..(39): C-terminal amidation

SEQ ID NO: 2353 - protein, 40 aa, Artificial Sequence; identical to SEQ ID NO: 2120
  Synthetic peptide
  MISC_FEATURE (2)..(2): Xaa is AIB
  MISC_FEATURE (10)..(10): Acylated or alkylated, optionally, via a spacer
  MISC_FEATURE (20)..(20): Xaa is AIB
  MISC_FEATURE (40)..(40): Covalently bound to PEG
  MISC_FEATURE (40)..(40): C-terminal amidation

SEQ ID NO: 2354 - protein, 41 aa, Artificial Sequence; identical to SEQ ID NO: 2121
  Synthetic peptide
  MISC_FEATURE (2)..(2): Xaa is AIB
  MISC_FEATURE (20)..(20): Xaa is AIB
  MISC_FEATURE (40)..(40): Acylated or alkylated, optionally, via a spacer
  MISC_FEATURE (41)..(41): C-terminal amidation

SEQ ID NO: 2355 - protein, 41 aa, Artificial Sequence; identical to SEQ ID NO: 2122
  Synthetic peptide
  MISC_FEATURE (2)..(2): Xaa is AIB
  MISC_FEATURE (20)..(20): Xaa is AIB
  MISC_FEATURE (40)..(40): Acylated or alkylated, optionally, via a spacer
  MISC_FEATURE (41)..(41): Covalently bound to a PEG
  MISC_FEATURE (41)..(41): C-terminal amidation

SEQ ID NO: 2356 - protein, 40 aa, Artificial Sequence; identical to SEQ ID NO: 2120
  Synthetic peptide
  MISC_FEATURE (2)..(2): Xaa is AIB
  MISC_FEATURE (10)..(10): Acylated or alkylated, optionally, via a spacer
  MISC_FEATURE (20)..(20): Xaa is AIB
  MISC_FEATURE (40)..(40): Covalently bound to PEG
  MISC_FEATURE (40)..(40): C-terminal amidation

SEQ ID NO: 2357 - protein, 40 aa, Artificial Sequence; identical to SEQ ID NO: 2120
  Synthetic peptide
  MISC_FEATURE (2)..(2): Xaa is AIB
  MISC_FEATURE (10)..(10): Acylated or alkylated, optionally, via a spacer
  MISC_FEATURE (20)..(20): Xaa is AIB
  MISC_FEATURE (40)..(40): Covalently bound to PEG
  MISC_FEATURE (40)..(40): C-terminal amidation

SEQ ID NO: 2358 - protein, 40 aa, Artificial Sequence; identical to SEQ ID NO: 766
  Synthetic peptide
  MISC_FEATURE (2)..(2): Xaa is AIB
  MISC_FEATURE (20)..(20): Xaa is AIB
  MISC_FEATURE (24)..(24): Covalently bound to PEG
  MISC_FEATURE (40)..(40): Acylated or alkylated, optionally, via a spacer
  MISC_FEATURE (40)..(40): C-terminal amidation

SEQ ID NO: 2359 - protein, 31 aa, Artificial Sequence; identical to SEQ ID NO: 2126
  Synthetic peptide
  MISC_FEATURE (2)..(2): Xaa is AIB
  MISC_FEATURE (10)..(10): Acylated or alkylated, optionally, via a spacer
  MISC_FEATURE (20)..(20): Xaa is AIB
  MISC_FEATURE (31)..(31): C-terminal amidation

SEQ ID NO: 2360 - protein, 31 aa, Artificial Sequence; identical to SEQ ID NO: 2127
  Synthetic peptide
  MISC_FEATURE (2)..(2): d-Ser
  MISC_FEATURE (10)..(10): Acylated or alkylated, optionally, via a spacer
  MISC_FEATURE (20)..(20): Xaa is AIB
  MISC_FEATURE (31)..(31): C-terminal amiation

SEQ ID NO: 2361 - protein, 39 aa, Artificial Sequence; identical to SEQ ID NO: 2128
  Synthetic peptide
  MISC_FEATURE (2)..(2): d-Ser
  MISC_FEATURE (10)..(10): Acylated or alkylated, optionally, via a spacer
  MISC_FEATURE (20)..(20): Xaa is AIB
  MISC_FEATURE (39)..(39): C-terminal amidation

SEQ ID NO: 2362 - protein, 39 aa, Artificial Sequence; identical to SEQ ID NO: 2109
  Synthetic peptide
  MISC_FEATURE (2)..(2): Xaa is AIB
  MISC_FEATURE (10)..(10): Acylated or alkylated, optionally, via a spacer
  MISC_FEATURE (20)..(20): Xaa is AIB
  MISC_FEATURE (39)..(39): C-terminal amidation

SEQ ID NO: 2363 - protein, 39 aa, Artificial Sequence; identical to SEQ ID NO: 2012
  Synthetic peptide
  MISC_FEATURE (2)..(2): Xaa is AIB
  MISC_FEATURE (10)..(10): Acylated or alkylated, optionally, via a spacer
  MISC_FEATURE (39)..(39): C-terminal amidation

SEQ ID NO: 2364 - protein, 39 aa, Artificial Sequence; identical to SEQ ID NO: 2119
  Synthetic peptide
  MISC_FEATURE (2)..(2): Xaa is AIB
  MISC_FEATURE (10)..(10): Acylated or alkylated, optionally, via a spacer
  MISC_FEATURE (20)..(20): Xaa is AIB
  MISC_FEATURE (39)..(39): C-terminal amidation

SEQ ID NO: 2365 - protein, 39 aa, Artificial Sequence; identical to SEQ ID NO: 758
  Synthetic peptide
  MISC_FEATURE (2)..(2): Xaa is AIB
  MISC_FEATURE (10)..(10): Acylated or alkylated, optionally, via a spacer
  MISC_FEATURE (20)..(20): Xaa is AIB
  MISC_FEATURE (39)..(39): C-terminal amidation

SEQ ID NO: 2366 - protein, 39 aa, Artificial Sequence; identical to SEQ ID NO: 2133
  Synthetic peptide
  MISC_FEATURE (2)..(2): Xaa is AIB
  MISC_FEATURE (10)..(10): Acylated or alkylated, optionally, via a spacer
  MISC_FEATURE (20)..(20): Xaa is AIB
  MISC_FEATURE (39)..(39): C-terminal amidation

SEQ ID NO: 2367 - protein, 39 aa, Artificial Sequence; identical to SEQ ID NO: 2113
  Synthetic peptide
  MISC_FEATURE (2)..(2): Xaa is AIB
  MISC_FEATURE (10)..(10): Acylated or alkylated, optionally, via a spacer
  MISC_FEATURE (20)..(20): Xaa is AIB
  MISC_FEATURE (39)..(39): C-terminal amidation

SEQ ID NO: 2368 - protein, 29 aa, Artificial Sequence
  Synthetic peptide
  MISC_FEATURE (2)..(2): Xaa is AIB
  MISC_FEATURE (10)..(10): Acylated or alkylated, optionally, via a spacer
  MISC_FEATURE (20)..(20): Xaa is AIB
  MISC_FEATURE (29)..(29): C-terminal amidation
HXEGTFTSDKSKYLDERRAXEFVQWLLDT

SEQ ID NO: 2369 - protein, 40 aa, Artificial Sequence; identical to SEQ ID NO: 2136
  Synthetic peptide
  MISC_FEATURE (2)..(2): Xaa is AIB
  MISC_FEATURE (40)..(40): Acylated or alkylated, optionally, via a spacer
  MISC_FEATURE (40)..(40): C-terminal amidation

SEQ ID NO: 2370 - protein, 40 aa, Artificial Sequence; identical to SEQ ID NO: 2137
  Synthetic peptide
  MISC_FEATURE (2)..(2): Xaa is AIB
  MISC_FEATURE (20)..(20): Xaa is AIB
  MISC_FEATURE (40)..(40): Acylated or alkylated, optionally, via a spacer
  MISC_FEATURE (40)..(40): C-terminal amidation

SEQ ID NO: 2371 - protein, 40 aa, Artificial Sequence; identical to SEQ ID NO: 2138
  Synthetic peptide
  MISC_FEATURE (2)..(2): Xaa is AIB
  MISC_FEATURE (20)..(20): Xaa is AIB
  MISC_FEATURE (40)..(40): Acylated or alkylated, optionally, via a spacer
  MISC_FEATURE (40)..(40): C-terminal amidation

SEQ ID NO: 2372 - protein, 41 aa, Artificial Sequence; identical to SEQ ID NO: 2011
  Synthetic peptide
  MISC_FEATURE (2)..(2): Xaa is AIB
  MISC_FEATURE (40)..(40): Acylated or alkylated, optionally, via a spacer
  MISC_FEATURE (41)..(41): C-terminal amidation

SEQ ID NO: 2373 - protein, 39 aa, Artificial Sequence; identical to SEQ ID NO: 2010
  Synthetic peptide
  MISC_FEATURE (2)..(2): Xaa is AIB
  MISC_FEATURE (10)..(10): Acylated or alkylated, optionally, via a spacer
  MISC_FEATURE (39)..(39): C-terminal amidation

SEQ ID NO: 2374 - protein, 39 aa, Artificial Sequence; identical to SEQ ID NO: 2141
  Synthetic peptide
  MISC_FEATURE (2)..(2): Xaa is AIB
  MISC_FEATURE (10)..(10): Acylated or alkylated, optionally, via a spacer
  MISC_FEATURE (20)..(20): Xaa is AIB
  MISC_FEATURE (39)..(39): C-terminal amidation

SEQ ID NO: 2375 - protein, 29 aa, Artificial Sequence
  Synthetic peptide
  MISC_FEATURE (2)..(2): Xaa is AIB
  MISC_FEATURE (10)..(10): Acylated or alkylated, optionally, via a spacer
  MISC_FEATURE (20)..(20): Xaa is AIB
  MISC_FEATURE (29)..(29): C-terminal amidation
YXQGTFTSDKSIYLDKQAAXEFVNWLLDT

SEQ ID NO: 2376 - protein, 39 aa, Artificial Sequence; identical to SEQ ID NO: 2100
  Synthetic peptide
  MISC_FEATURE: Analog #29
  MISC_FEATURE (2)..(2): d-Ser
  MISC_FEATURE (10)..(10): Acylated or alkylated, optionally, via a spacer
  MISC_FEATURE (39)..(39): C-terminal amidation

SEQ ID NO: 2377 - protein, 39 aa, Artificial Sequence; identical to SEQ ID NO: 2010
  Synthetic peptide
  MISC_FEATURE: Analog #30
  MISC_FEATURE (2)..(2): Xaa is AIB
  MISC_FEATURE (10)..(10): Acylated or alkylated, optionally, via a spacer
  MISC_FEATURE (39)..(39): C-terminal amidation

SEQ ID NO: 2378 - protein, 31 aa, Artificial Sequence; identical to SEQ ID NO: 2102
  Synthetic peptide
  MISC_FEATURE: Analog #34
  MISC_FEATURE (2)..(2): Xaa is AIB
  MISC_FEATURE (10)..(10): Acylated or alkylated, optionally, via a spacer
  MISC_FEATURE (31)..(31): C-terminal amidation

SEQ ID NO: 2379 - protein, 29 aa, Artificial Sequence
  Synthetic peptide
  MISC_FEATURE: Analog #36
  MISC_FEATURE (2)..(2): d-Ser
  MISC_FEATURE (10)..(10): Acylated or alkylated, optionally, via a spacer
  MISC_FEATURE (20)..(20): Xaa is AIB
  MISC_FEATURE (29)..(29): C-terminal amidation
HSQGTFTSDKSKYLDERRAXEFVQWLLDT

SEQ ID NO: 2380 - protein, 29 aa, Artificial Sequence
  Synthetic peptide
  MISC_FEATURE: Analog #37
  MISC_FEATURE (2)..(2): Xaa is AIB
  MISC_FEATURE (10)..(10): Acylated or alkylated, optionally, via a spacer
  MISC_FEATURE (20)..(20): Xaa is AIB
  MISC_FEATURE (29)..(29): C-terminal amidation
HXQGTFTSDKSKYLDERRAXEFVQWLLDT

SEQ ID NO: 2381 - protein, 29 aa, Artificial Sequence
  Synthetic peptide
  MISC_FEATURE: Analog #44
  MISC_FEATURE (1)..(1): Xaa is alpha-dimethyl imidiazole acetic acid (DMIA)
  MISC_FEATURE (2)..(2): d-Ser
  MISC_FEATURE (10)..(10): Acylated or alkylated, optionally, via a spacer
  MISC_FEATURE (29)..(29): C-terminal amidation
XSQGTFTSDKSKYLDERAAQDFVQWLLDT

SEQ ID NO: 2382 - protein, 39 aa, Artificial Sequence; identical to SEQ ID NO: 2106
  Synthetic peptide
  MISC_FEATURE: Analog #49
  MISC_FEATURE (2)..(2): Xaa is AIB
  MISC_FEATURE (10)..(10): Acylated or alkylated, optionally, via a spacer
  MISC_FEATURE (16)..(16): Xaa is AIB
  MISC_FEATURE (39)..(39): C-terminal amidation

SEQ ID NO: 2383 - protein, 39 aa, Artificial Sequence; identical to SEQ ID NO: 2107
  Synthetic peptide
  MISC_FEATURE: Analog #53
  MISC_FEATURE (2)..(2): Xaa is AIB
  MISC_FEATURE (10)..(10): Acylated or alkylated, optionally, via a spacer
  MISC_FEATURE (16)..(16): Xaa is AIB
  MISC_FEATURE (39)..(39): C-terminal amidation

SEQ ID NO: 2384 - protein, 39 aa, Artificial Sequence; identical to SEQ ID NO: 2108
  Synthetic peptide
  MISC_FEATURE: Analog #54
  MISC_FEATURE (2)..(2): Xaa is AIB
  MISC_FEATURE (10)..(10): Acylated or alkylated, optionally, via a spacer
  MISC_FEATURE (16)..(16): Xaa is AIB
  MISC_FEATURE (39)..(39): C-terminal amidation

SEQ ID NO: 2385 - protein, 39 aa, Artificial Sequence; identical to SEQ ID NO: 2109
  Synthetic peptide
  MISC_FEATURE: Analog #61
  MISC_FEATURE (2)..(2): Xaa is AIB
  MISC_FEATURE (10)..(10): Acylated or alkylated, optionally, via a spacer
  MISC_FEATURE (20)..(20): Xaa is AIB
  MISC_FEATURE (39)..(39): C-terminal amidation

SEQ ID NO: 2386 - protein, 39 aa, Artificial Sequence; identical to SEQ ID NO: 2110
  Synthetic peptide
  MISC_FEATURE: Analog #62
  MISC_FEATURE (2)..(2): Xaa is AIB
  MISC_FEATURE (10)..(10): Acylated or alkylated, optionally, via a spacer
  MISC_FEATURE (20)..(20): Xaa is AIB
  MISC_FEATURE (39)..(39): C-terminal amidation

SEQ ID NO: 2387 - protein, 39 aa, Artificial Sequence; identical to SEQ ID NO: 2012
  Synthetic peptide
  MISC_FEATURE: Analog #63
  MISC_FEATURE (2)..(2): Xaa is AIB
  MISC_FEATURE (10)..(10): Acylated or alkylated, optionally, via a spacer
  MISC_FEATURE (39)..(39): C-terminal amidation

SEQ ID NO: 2388 - protein, 29 aa, Artificial Sequence
  Synthetic peptide
  MISC_FEATURE: Analog #64
  MISC_FEATURE (2)..(2): Xaa is AIB
  MISC_FEATURE (10)..(10): Acylated or alkylated, optionally, via a spacer
  MISC_FEATURE (20)..(20): Xaa is AIB
  MISC_FEATURE (29)..(29): C-terminal amidation
HXEGTFTSDKSKYLDERRAXEFVQWLLDT

SEQ ID NO: 2389 - protein, 39 aa, Artificial Sequence; identical to SEQ ID NO: 2113
  Synthetic peptide
  MISC_FEATURE: Analog #65
  MISC_FEATURE (2)..(2): Xaa is AIB
  MISC_FEATURE (10)..(10): Acylated or alkylated, optionally, via a spacer
  MISC_FEATURE (20)..(20): Xaa is AIB
  MISC_FEATURE (39)..(39): C-terminal amidation

SEQ ID NO: 2390 - protein, 29 aa, Artificial Sequence
  Synthetic peptide
  MISC_FEATURE (2)..(2): Xaa is AIB
  MISC_FEATURE (9)..(9): Acylated or alkylated, optionally, via a spacer
  MISC_FEATURE (16)..(16): Xaa is AIB
  MISC_FEATURE (29)..(29): C-terminal amidation
HXQGTFTSKYSKYLDXRRAQDFVQWLMNT

SEQ ID NO: 2391 - protein, 29 aa, Artificial Sequence
  Synthetic peptide
  MISC_FEATURE (2)..(2): Xaa is AIB
  MISC_FEATURE (10)..(10): Acylated or alkylated, optionally, via a spacer
  MISC_FEATURE (16)..(16): Xaa is AIB
  MISC_FEATURE (29)..(29): C-terminal amidation
HXQGTFTSDKSKYLDXRRAQDFVQWLMNT

SEQ ID NO: 2392 - protein, 29 aa, Artificial Sequence
  Synthetic peptide
  MISC_FEATURE (2)..(2): Xaa is AIB
  MISC_FEATURE (12)..(12): Acylated or alkylated, optionally, via a spacer
  MISC_FEATURE (16)..(16): Xaa is AIB
  MISC_FEATURE (29)..(29): C-terminal amidation
HXQGTFTSDYSKYLDXRRAQDFVQWLMNT

SEQ ID NO: 2393 - protein, 29 aa, Artificial Sequence
  Synthetic peptide
  MISC_FEATURE (2)..(2): Xaa is AIB
  MISC_FEATURE (16)..(16): Acylated or alkylated, optionally, via a spacer
  MISC_FEATURE (29)..(29): C-terminal amidation
HXQGTFTSDYSKYLDKRRAQDFVQWLMNT

SEQ ID NO: 2394 - protein, 29 aa, Artificial Sequence
  Synthetic peptide
  MISC_FEATURE (2)..(2): Xaa is AIB
  MISC_FEATURE (16)..(16): Xaa is AIB
  MISC_FEATURE (20)..(20): Acylated or alkylated, optionally, via a spacer
  MISC_FEATURE (29)..(29): C-terminal amidation
HXQGTFTSDYSKYLDXRRAKDFVQWLMNT

SEQ ID NO: 2395 - protein, 39 aa, Artificial Sequence; identical to SEQ ID NO: 2119
  Synthetic peptide
  MISC_FEATURE (2)..(2): Xaa is AIB
  MISC_FEATURE (10)..(10): Acylated or alkylated, optionally, via a spacer
  MISC_FEATURE (20)..(20): Xaa is AIB
  MISC_FEATURE (39)..(39): C-terminal amidation

SEQ ID NO: 2396 - protein, 39 aa, Artificial Sequence; identical to SEQ ID NO: 2119
  Synthetic peptide
  MISC_FEATURE (2)..(2): Xaa is AIB
  MISC_FEATURE (10)..(10): Acylated or alkylated, optionally, via a spacer
  MISC_FEATURE (20)..(20): Xaa is AIB
  MISC_FEATURE (39)..(39): Covalently bound to PEG
  MISC_FEATURE (39)..(39): C-terminal amidation

SEQ ID NO: 2397 - protein, 41 aa, Artificial Sequence; identical to SEQ ID NO: 2121
  Synthetic peptide
  MISC_FEATURE (2)..(2): Xaa is AIB
  MISC_FEATURE (20)..(20): Xaa is AIB
  MISC_FEATURE (40)..(40): Acylated or alkylated, optionally, via a spacer
  MISC_FEATURE (41)..(41): C-terminal amidation

SEQ ID NO: 2398 - protein, 41 aa, Artificial Sequence; identical to SEQ ID NO: 2122
  Synthetic peptide
  MISC_FEATURE (2)..(2): Xaa is AIB
  MISC_FEATURE (20)..(20): Xaa is AIB
  MISC_FEATURE (40)..(40): Acylated or alkylated, optionally, via a spacer
  MISC_FEATURE (41)..(41): Covalently bound to PEG
  MISC_FEATURE (41)..(41): C-terminal amidation

SEQ ID NO: 2399 - protein, 40 aa, Artificial Sequence; identical to SEQ ID NO: 2120
  Synthetic peptide
  MISC_FEATURE (2)..(2): Xaa is AIB
  MISC_FEATURE (10)..(10): Acylated or alkylated, optionally, via a spacer
  MISC_FEATURE (20)..(20): Xaa is AIB
  MISC_FEATURE (40)..(40): Covalently bound to PEG
  MISC_FEATURE (40)..(40): C-terminal amidation

SEQ ID NO: 2400 - protein, 40 aa, Artificial Sequence; identical to SEQ ID NO: 2120
  Synthetic peptide
  MISC_FEATURE (2)..(2): Xaa is AIB
  MISC_FEATURE (10)..(10): Acylated or alkylated, optionally, via a spacer
  MISC_FEATURE (20)..(20): Xaa is AIB
  MISC_FEATURE (40)..(40): Covalently bound to PEG
  MISC_FEATURE (40)..(40): C-terminal amidation

SEQ ID NO: 2401 - protein, 31 aa, Artificial Sequence; identical to SEQ ID NO: 2126
  Synthetic peptide
  MISC_FEATURE (2)..(2): Xaa is AIB
  MISC_FEATURE (10)..(10): Acylated or alkylated, optionally, via a spacer
  MISC_FEATURE (20)..(20): Xaa is AIB
  MISC_FEATURE (31)..(31): C-terminal amidation

SEQ ID NO: 2402 - protein, 31 aa, Artificial Sequence; identical to SEQ ID NO: 2127
  Synthetic peptide
  MISC_FEATURE (2)..(2): d-Ser
  MISC_FEATURE (10)..(10): Acylated or alkylated, optionally, via a spacer
  MISC_FEATURE (20)..(20): Xaa is AIB
  MISC_FEATURE (31)..(31): C-terminal amiation

SEQ ID NO: 2403 - protein, 39 aa, Artificial Sequence; identical to SEQ ID NO: 2128
  Synthetic peptide
  MISC_FEATURE (2)..(2): d-Ser
  MISC_FEATURE (10)..(10): Acylated or alkylated, optionally, via a spacer
  MISC_FEATURE (20)..(20): Xaa is AIB
  MISC_FEATURE (39)..(39): C-terminal amidation

SEQ ID NO: 2404 - protein, 39 aa, Artificial Sequence; identical to SEQ ID NO: 2109
  Synthetic peptide
  MISC_FEATURE (2)..(2): Xaa is AIB
  MISC_FEATURE (10)..(10): Acylated or alkylated, optionally, via a spacer
  MISC_FEATURE (20)..(20): Xaa is AIB
  MISC_FEATURE (39)..(39): C-terminal amidation

SEQ ID NO: 2405 - protein, 39 aa, Artificial Sequence; identical to SEQ ID NO: 2012
  Synthetic peptide
  MISC_FEATURE (2)..(2): Xaa is AIB
  MISC_FEATURE (10)..(10): Acylated or alkylated, optionally, via a spacer
  MISC_FEATURE (39)..(39): C-terminal amidation

SEQ ID NO: 2406 - protein, 39 aa, Artificial Sequence; identical to SEQ ID NO: 2119
  Synthetic peptide
  MISC_FEATURE (2)..(2): Xaa is AIB
  MISC_FEATURE (10)..(10): Acylated or alkylated, optionally, via a spacer
  MISC_FEATURE (20)..(20): Xaa is AIB
  MISC_FEATURE (39)..(39): C-terminal amidation

SEQ ID NO: 2407 - protein, 39 aa, Artificial Sequence; identical to SEQ ID NO: 758
  Synthetic peptide
  MISC_FEATURE (2)..(2): Xaa is AIB
  MISC_FEATURE (10)..(10): Acylated or alkylated, optionally, via a spacer
  MISC_FEATURE (20)..(20): Xaa is AIB
  MISC_FEATURE (39)..(39): C-terminal amidation

SEQ ID NO: 2408 - protein, 39 aa, Artificial Sequence; identical to SEQ ID NO: 2133
  Synthetic peptide
  MISC_FEATURE (2)..(2): Xaa is AIB
  MISC_FEATURE (10)..(10): Acylated or alkylated, optionally, via a spacer
  MISC_FEATURE (20)..(20): Xaa is AIB
  MISC_FEATURE (39)..(39): C-terminal amidation

SEQ ID NO: 2409 - protein, 39 aa, Artificial Sequence; identical to SEQ ID NO: 2113
  Synthetic peptide
  MISC_FEATURE (2)..(2): Xaa is AIB
  MISC_FEATURE (10)..(10): Acylated or alkylated, optionally, via a spacer
  MISC_FEATURE (20)..(20): Xaa is AIB
  MISC_FEATURE (39)..(39): C-terminal amidation

SEQ ID NO: 2410 - protein, 29 aa, Artificial Sequence
  Synthetic peptide
  MISC_FEATURE (2)..(2): Xaa is AIB
  MISC_FEATURE (10)..(10): Acylated or alkylated, optionally, via a spacer
  MISC_FEATURE (20)..(20): Xaa is AIB
  MISC_FEATURE (29)..(29): C-terminal amidation
HXEGTFTSDKSKYLDERRAXEFVQWLLDT

SEQ ID NO: 2411 - protein, 41 aa, Artificial Sequence; identical to SEQ ID NO: 2011
  Synthetic peptide
  MISC_FEATURE (2)..(2): Xaa is AIB
  MISC_FEATURE (40)..(40): Acylated or alkylated, optionally, via a spacer
  MISC_FEATURE (41)..(41): C-terminal amidation

SEQ ID NO: 2412 - protein, 39 aa, Artificial Sequence; identical to SEQ ID NO: 2010
  Synthetic peptide
  MISC_FEATURE (2)..(2): Xaa is AIB
  MISC_FEATURE (10)..(10): Acylated or alkylated, optionally, via a spacer
  MISC_FEATURE (39)..(39): C-terminal amidation

SEQ ID NO: 2413 - protein, 39 aa, Artificial Sequence; identical to SEQ ID NO: 2141
  Synthetic peptide
  MISC_FEATURE (2)..(2): Xaa is AIB
  MISC_FEATURE (10)..(10): Acylated or alkylated, optionally, via a spacer
  MISC_FEATURE (20)..(20): Xaa is AIB
  MISC_FEATURE (39)..(39): C-terminal amidation

SEQ ID NO: 2414 - protein, 29 aa, Artificial Sequence
  Synthetic peptide
  MISC_FEATURE (2)..(2): Xaa is AIB
  MISC_FEATURE (10)..(10): Acylated or alkylated, optionally, via a spacer
  misc_feature (20)..(20): Xaa can be any naturally occurring amino acid
  MISC_FEATURE (29)..(29): C-terminal amidation
YXQGTFTSDKSIYLDKQAAXEFVNWLLDT

SEQ ID NO: 2415 - protein, 40 aa, Artificial Sequence; identical to SEQ ID NO: 756
  Synthetic polypeptide
  MISC_FEATURE: mt-261
  MOD_RES (2)..(2): Xaa is Aib
  MOD_RES (20)..(20): Xaa is Aib
  MISC_FEATURE (40)..(40): Acylated or alkylated, optionally, via a spacer
  MISC_FEATURE (40)..(40): C-terminal amidation

SEQ ID NO: 2416 - protein, 40 aa, Artificial Sequence; identical to SEQ ID NO: 1123
  Synthetic polypeptide
  MISC_FEATURE: mt-278
  MOD_RES (2)..(2): Xaa is Aib
  MOD_RES (20)..(20): Xaa is Aib
  MISC_FEATURE (40)..(40): Acylated or alkylated, optionally, via a spacer
  MISC_FEATURE (40)..(40): C-terminal amidation

SEQ ID NO: 2417 - protein, 39 aa, Artificial Sequence; identical to SEQ ID NO: 2119
  Synthetic peptide
  MISC_FEATURE: mt-384
  MISC_FEATURE (2)..(2): Xaa is AIB
  MISC_FEATURE (10)..(10): Acylated or alkylated, optionally, via a spacer
  MISC_FEATURE (20)..(20): Xaa is AIB
  MISC_FEATURE (39)..(39): C-terminal amidation

SEQ ID NO: 2418 - protein, 39 aa, Artificial Sequence; identical to SEQ ID NO: 2119
  Synthetic peptide
  MISC_FEATURE: mt-384
  MISC_FEATURE (2)..(2): Xaa is AIB
  MISC_FEATURE (10)..(10): Acylated or alkylated, optionally, via a spacer
  MISC_FEATURE (20)..(20): Xaa is AIB
  MISC_FEATURE (39)..(39): C-terminal amidation

SEQ ID NO: 2419 - protein, 40 aa, Artificial Sequence; identical to SEQ ID NO: 756
  Synthetic peptide
  MISC_FEATURE (2)..(2): Xaa is AIB
  MISC_FEATURE (20)..(20): Xaa is AIB
  MISC_FEATURE (40)..(40): Acylated or alkylated, optionally, via a spacer
  MISC_FEATURE (40)..(40): C-terminal amidation

SEQ ID NO: 2420 - protein, 41 aa, Artificial Sequence; identical to SEQ ID NO: 2187
  Synthetic peptide
  MISC_FEATURE (2)..(2): Xaa is AIB
  MISC_FEATURE (20)..(20): Xaa is AIB
  MISC_FEATURE (40)..(40): Acylated or alkylated, optionally, via a spacer
  MISC_FEATURE (41)..(41): C-terminal amidation

SEQ ID NO: 2421 - protein, 41 aa, Artificial Sequence; identical to SEQ ID NO: 2187
  Synthetic peptide
  MISC_FEATURE (2)..(2): Xaa is AIB
  MISC_FEATURE (20)..(20): Xaa is AIB
  MISC_FEATURE (40)..(40): Acylated or alkylated, optionally, via a spacer
  MISC_FEATURE (41)..(41): C-terminal amidation

SEQ ID NO: 2422 - protein, 41 aa, Artificial Sequence; identical to SEQ ID NO: 2187
  Synthetic peptide
  MISC_FEATURE (2)..(2): Xaa is AIB
  MISC_FEATURE (20)..(20): Xaa is AIB
  MISC_FEATURE (40)..(40): Acylated or alkylated, optionally, via a spacer
  MISC_FEATURE (41)..(41): C-terminal amidation

SEQ ID NO: 2423 - protein, 41 aa, Artificial Sequence; identical to SEQ ID NO: 2187
  Synthetic peptide
  MISC_FEATURE (2)..(2): Xaa is AIB
  MISC_FEATURE (20)..(20): Xaa is AIB
  MISC_FEATURE (40)..(40): Acylated or alkylated, optionally, via a spacer
  MISC_FEATURE (41)..(41): C-terminal amidation

SEQ ID NO: 2424 - protein, 39 aa, Artificial Sequence; identical to SEQ ID NO: 1198
  Synthetic peptide
  MISC_FEATURE (2)..(2): Xaa is AIB
  MISC_FEATURE (10)..(10): Xaa is 4-amino-Phe
  MISC_FEATURE (10)..(10): Acylated or alkylated, optionally, via a spacer
  MISC_FEATURE (20)..(20): Xaa is AIB
  MISC_FEATURE (39)..(39): C-terminal amidation

SEQ ID NO: 2425 - protein, 39 aa, Artificial Sequence; identical to SEQ ID NO: 1198
  Synthetic peptide
  MISC_FEATURE (2)..(2): Xaa is AIB
  MISC_FEATURE (10)..(10): Xaa is 4-amino-Phe
  MISC_FEATURE (10)..(10): Acylated or alkylated, optionally, via a spacer
  MISC_FEATURE (20)..(20): Xaa is AIB
  MISC_FEATURE (39)..(39): C-terminal amidation

SEQ ID NO: 2426 - protein, 41 aa, Artificial Sequence; identical to SEQ ID NO: 2193
  Synthetic peptide
  MISC_FEATURE (2)..(2): Xaa is AIB
  MISC_FEATURE (40)..(40): Xaa is 4-amino-Phe
  MISC_FEATURE (40)..(40): Acylated or alkylated, optionally, via a spacer
  MISC_FEATURE (41)..(41): C-terminal amidation

SEQ ID NO: 2427 - protein, 41 aa, Artificial Sequence; identical to SEQ ID NO: 2193
  Synthetic peptide
  MOD_RES (2)..(2): Xaa is AIB
  MOD_RES (40)..(40): Xaa is 4-amino Phe
  MOD_RES (40)..(40): Acylated or alkylated, optionally, via a spacer
  MOD_RES (41)..(41): C-terminal amidation

SEQ ID NO: 2428 - protein, 39 aa, Artificial Sequence; identical to SEQ ID NO: 2195
  Synthetic peptide
  MISC_FEATURE (2)..(2): Xaa is AIB
  MISC_FEATURE (6)..(6): Xaa is 4-amino-Phe
  MISC_FEATURE (6)..(6): Acylated or alkylated, optionally, via a spacer
  MISC_FEATURE (39)..(39): C-terminal amidation

SEQ ID NO: 2429 - protein, 39 aa, Artificial Sequence; identical to SEQ ID NO: 2196
  Synthetic peptide
  MISC_FEATURE (2)..(2): Xaa is AIB
  MISC_FEATURE (10)..(10): Xaa is 4-amino-Phe
  MISC_FEATURE (10)..(10): Acylated or alkylated, optionally, via a spacer
  MISC_FEATURE (39)..(39): C-terminal amidation

SEQ ID NO: 2430 - protein, 39 aa, Artificial Sequence; identical to SEQ ID NO: 2197
  Synthetic peptide
  MISC_FEATURE (2)..(2): Xaa is AIB
  MISC_FEATURE (13)..(13): Xaa is 4-amino-Phe
  MISC_FEATURE (13)..(13): Acylated or alkylated, optionally, via a spacer
  MISC_FEATURE (39)..(39): C-terminal amidation

SEQ ID NO: 2431 - protein, 39 aa, Artificial Sequence; identical to SEQ ID NO: 2196
  Synthetic peptide
  MISC_FEATURE (2)..(2): Xaa is AIB
  MISC_FEATURE (10)..(10): Xaa is 4-amino-Phe
  MISC_FEATURE (10)..(10): Acylated or alkylated, optionally, via a spacer
  MISC_FEATURE (39)..(39): C-terminal amidation

SEQ ID NO: 2432 - protein, 39 aa, Artificial Sequence; identical to SEQ ID NO: 2199
  Synthetic peptide
  MOD_RES (2)..(2): Xaa is AIB
  MOD_RES (13)..(13): Acylated or alkylated, optionally, via a spacer
  MOD_RES (39)..(39): C-terminal amidation

SEQ ID NO: 2433 - protein, 39 aa, Artificial Sequence; identical to SEQ ID NO: 2200
  Synthetic peptide
  MISC_FEATURE (2)..(2): Xaa is AIB
  MISC_FEATURE (14)..(14): Acylated or alkylated, optionally, via a spacer
  MISC_FEATURE (39)..(39): C-terminal amidation

SEQ ID NO: 2434 - protein, 39 aa, Artificial Sequence; identical to SEQ ID NO: 2201
  Synthetic peptide
  MISC_FEATURE (2)..(2): Xaa is AIB
  MISC_FEATURE (16)..(16): Acylated or alkylated, optionally, via a spacer
  MISC_FEATURE (39)..(39): C-terminal amidation

SEQ ID NO: 2435 - protein, 39 aa, Artificial Sequence; identical to SEQ ID NO: 2202
  Synthetic peptide
  MISC_FEATURE (2)..(2): Xaa is AIB
  MISC_FEATURE (17)..(17): Acylated or alkylated, optionally, via a spacer
  MISC_FEATURE (39)..(39): C-terminal amidation

SEQ ID NO: 2436 - protein, 41 aa, Artificial Sequence; identical to SEQ ID NO: 2011
  Synthetic peptide
  MISC_FEATURE (2)..(2): Xaa is AIB
  MISC_FEATURE (40)..(40): Acylated or alkylated, optionally, via a spacer
  MISC_FEATURE (41)..(41): C-terminal amidation

SEQ ID NO: 2437 - protein, 41 aa, Artificial Sequence; identical to SEQ ID NO: 2011
  Synthetic peptide
  MISC_FEATURE (2)..(2): Xaa is AIB
  MISC_FEATURE (40)..(40): Acylated or alkylated, optionally, via a spacer
  MISC_FEATURE (41)..(41): C-terminal amidation

SEQ ID NO: 2438 - protein, 41 aa, Artificial Sequence; identical to SEQ ID NO: 2011
  Synthetic peptide
  MISC_FEATURE (2)..(2): Xaa is AIB
  MISC_FEATURE (40)..(40): Acylated or alkylated, optionally, via a spacer
  MISC_FEATURE (41)..(41): C-terminal amidation

SEQ ID NO: 2439 - protein, 41 aa, Artificial Sequence; identical to SEQ ID NO: 2011
  Synthetic peptide
  MISC_FEATURE (2)..(2): Xaa is AIB
  MISC_FEATURE (40)..(40): Acylated or alkylated, optionally, via a spacer
  MISC_FEATURE (41)..(41): C-terminal amidation

SEQ ID NO: 2440 - protein, 41 aa, Artificial Sequence; identical to SEQ ID NO: 2011
  Synthetic peptide
  MISC_FEATURE (2)..(2): Xaa is AIB
  MISC_FEATURE (40)..(40): Acylated or alkylated, optionally, via a spacer
  MISC_FEATURE (41)..(41): C-terminal amidation

SEQ ID NO: 2441 - protein, 39 aa, Artificial Sequence; identical to SEQ ID NO: 2010
  Synthetic peptide
  MISC_FEATURE (2)..(2): Xaa is AIB
  MISC_FEATURE (10)..(10): Acylated or alkylated, optionally, via a spacer
  MISC_FEATURE (39)..(39): C-terminal amidation

SEQ ID NO: 2442 - protein, 40 aa, Artificial Sequence; identical to SEQ ID NO: 2209
  Synthetic peptide
  MISC_FEATURE (2)..(2): Xaa is AIB
  MISC_FEATURE (40)..(40): Acylated or alkylated, optionally, via a spacer
  MISC_FEATURE (40)..(40): C-terminal amidation

SEQ ID NO: 2443 - protein, 39 aa, Artificial Sequence; identical to SEQ ID NO: 2010
  Synthetic peptide
  MISC_FEATURE (2)..(2): Xaa is AIB
  MISC_FEATURE (10)..(10): Acylated or alkylated, optionally, via a spacer
  MISC_FEATURE (39)..(39): C-terminal amidation

SEQ ID NO: 2444 - protein, 40 aa, Artificial Sequence; identical to SEQ ID NO: 2211
  Synthetic peptide
  MISC_FEATURE (2)..(2): Xaa is AIB
  MISC_FEATURE (10)..(10): Acylated or alkylated, optionally, via a spacer
  MISC_FEATURE (40)..(40): Acylated or alkylated, optionally, via a spacer
  MISC_FEATURE (40)..(40): C-terminal amidation

SEQ ID NO: 2445 - protein, 41 aa, Artificial Sequence; identical to SEQ ID NO: 2011
  Synthetic peptide
  MISC_FEATURE (2)..(2): Xaa is AIB
  MISC_FEATURE (40)..(40): Acylated or alkylated, optionally, via a spacer
  MISC_FEATURE (41)..(41): C-terminal amidation

SEQ ID NO: 2446 - protein, 41 aa, Artificial Sequence; identical to SEQ ID NO: 2011
  Synthetic peptide
  MISC_FEATURE (2)..(2): Xaa is AIB
  MISC_FEATURE (40)..(40): Acylated or alkylated, optionally, via a spacer
  MISC_FEATURE (41)..(41): C-terminal amidation

SEQ ID NO: 2447 - protein, 41 aa, Artificial Sequence; identical to SEQ ID NO: 2011
  Synthetic peptide
  MISC_FEATURE (2)..(2): Xaa is AIB
  MISC_FEATURE (40)..(40): Acylated or alkylated, optionally, via a spacer
  MISC_FEATURE (41)..(41): C-terminal amidation

SEQ ID NO: 2448 - protein, 41 aa, Artificial Sequence; identical to SEQ ID NO: 2011
  Synthetic peptide
  MISC_FEATURE (2)..(2): Xaa is AIB
  MISC_FEATURE (40)..(40): Acylated or alkylated, optionally, via a spacer
  MISC_FEATURE (41)..(41): C-terminal amidation

SEQ ID NO: 2449 - protein, 41 aa, Artificial Sequence; identical to SEQ ID NO: 2216
  Synthetic peptide
  MISC_FEATURE (2)..(2): Xaa is AIB
  MISC_FEATURE (40)..(40): Acylated or alkylated, optionally, via a spacer
  MISC_FEATURE (41)..(41): C-terminal amidation

SEQ ID NO: 2450 - protein, 40 aa, Artificial Sequence; identical to SEQ ID NO: 766
  Synthetic peptide
  MISC_FEATURE (2)..(2): Xaa is AIB
  MISC_FEATURE (20)..(20): Xaa is AIB
  MISC_FEATURE (24)..(24): Covalently bound to PEG
  MISC_FEATURE (40)..(40): Acylated or alkylated, optionally, via a spacer
  MISC_FEATURE (40)..(40): C-terminal amidation

SEQ ID NO: 2451 - protein, 40 aa, Artificial Sequence; identical to SEQ ID NO: 766
  Synthetic peptide
  MISC_FEATURE (2)..(2): Xaa is AIB
  MISC_FEATURE (20)..(20): Xaa is AIB
  MISC_FEATURE (24)..(24): Covalently bound to PEG
  MISC_FEATURE (40)..(40): Acylated or alkylated, optionally, via a spacer
  MISC_FEATURE (40)..(40): C-terminal amidation

SEQ ID NO: 2452 - protein, 40 aa, Artificial Sequence; identical to SEQ ID NO: 766
  Synthetic peptide
  MISC_FEATURE (2)..(2): Xaa is AIB
  MISC_FEATURE (20)..(20): Xaa is AIB
  MISC_FEATURE (24)..(24): Covalently bound to PEG
  MISC_FEATURE (40)..(40): Acylated or alkylated, optionally, via a spacer
  MISC_FEATURE (40)..(40): C-terminal amidation

SEQ ID NO: 2453 - protein, 41 aa, Artificial Sequence; identical to SEQ ID NO: 2011
  Synthetic peptide
  MISC_FEATURE (2)..(2): Xaa is AIB
  MISC_FEATURE (40)..(40): Acylated or alkylated, optionally, via a spacer
  MISC_FEATURE (41)..(41): C-terminal amidation

SEQ ID NO: 2454 - protein, 41 aa, Artificial Sequence; identical to SEQ ID NO: 2011
  Synthetic peptide
  MISC_FEATURE (2)..(2): Xaa is AIB
  MISC_FEATURE (40)..(40): Acylated or alkylated, optionally, via a spacer
  MISC_FEATURE (41)..(41): C-terminal amidation

SEQ ID NO: 2455 - protein, 41 aa, Artificial Sequence; identical to SEQ ID NO: 2222
  Synthetic peptide
  MISC_FEATURE (2)..(2): Xaa is AIB
  MISC_FEATURE (10)..(10): Xaa is Tyr or an amino acid acylated or alkylated, optionally, via a spacer
  MISC_FEATURE (18)..(18): Xaa is Arg or Ala
  MISC_FEATURE (20)..(20): Xaa is AIB or Gln
  MISC_FEATURE (21)..(21): Xaa is Asp or Glu
  MISC_FEATURE (28)..(28): Xaa is Asp or Glu
  MISC_FEATURE (35)..(35): Xaa is Ala, Arg or Lys
  MISC_FEATURE (40)..(40): Xaa is absent or is Gly (e.g. when position 10 is not Tyr) or is an amino acid acylated or alkylated, optionally, via a spacer
  MISC_FEATURE (41)..(41): Xaa is any amino acid and is optionally present when residue at position 40 is an amino acid acylated or alkylated, optionally, via a spacer
  MISC_FEATURE (41)..(41): C-terminal amidation

SEQ ID NO: 2456 - protein, 41 aa, Artificial Sequence; identical to SEQ ID NO: 2223
  Synthetic peptide
  MISC_FEATURE (2)..(2): Xaa is AIB
  MISC_FEATURE (10)..(10): Xaa is Tyr or an amino acid acylated or alkylated, optionally, via a spacer
  MISC_FEATURE (18)..(18): Xaa is Arg or Ala
  MISC_FEATURE (20)..(20): Xaa is AIB or Gln
  MISC_FEATURE (21)..(21): Xaa is Asp or Glu
  MISC_FEATURE (40)..(40): Xaa is absent or is Gly (e.g. when position 10 is not Tyr) or is an amino acid acylated or alkylated, optionally, via a spacer
  MISC_FEATURE (41)..(41): Xaa is any amino acid and is optionally present when residue at position 40 is an amino acid acylated or alkylated, optionally, via a spacer
  MISC_FEATURE (41)..(41): C-terminal amidation

SEQ ID NO: 2457 - protein, 41 aa, Artificial Sequence; identical to SEQ ID NO: 2011
  Synthetic peptide
  MISC_FEATURE (2)..(2): Xaa is AIB
  MISC_FEATURE (40)..(40): Acylated or alkylated, optionally, via a spacer
  MISC_FEATURE (41)..(41): C-terminal amidation

SEQ ID NO: 2458 - protein, 29 aa, Artificial Sequence
  Synthetic peptide
  MISC_FEATURE (1)..(29): At least one amino acid is an amino acid acylated or alkylated, optionally, via a spacer
  MISC_FEATURE (2)..(2): Xaa is AIB
  MISC_FEATURE (3)..(3): Xaa is Gln or Gln analog
  MISC_FEATURE (10)..(10): Xaa is Lys or Tyr
  MISC_FEATURE (18)..(18): Xaa is Arg or Ala
  MISC_FEATURE (20)..(20): Xaa is AIB or Gln
  MISC_FEATURE (21)..(21): Xaa is Asp or Glu
  MISC_FEATURE (29)..(29): Xaa is Thr or Gly
  MISC_FEATURE (29)..(29): C-terminal amidation
HXXGTFTSDXSKYLDERXAXXFVQWLLDX

SEQ ID NO: 2459 - protein, 29 aa, Artificial Sequence
  Synthetic peptide
  MISC_FEATURE (2)..(2): Xaa is AIB
  MISC_FEATURE (3)..(3): Xaa is Gln or Gln analog
  MISC_FEATURE (10)..(10): Xaa is Lys acylated or alkylated, optionally, via a spacer
  MISC_FEATURE (18)..(18): Xaa is Arg or Ala
  MISC_FEATURE (20)..(20): Xaa is AIB or Gln
  MISC_FEATURE (21)..(21): Xaa is Asp or Glu
  MISC_FEATURE (29)..(29): Xaa is Gly or Thr
  MISC_FEATURE (29)..(29): C-terminal amidation
HXXGTFTSDXSKYLDERXAXXFVQWLLDX

SEQ ID NO: 2460 - protein, 39 aa, Artificial Sequence; identical to SEQ ID NO: 2227
  Synthetic peptide
  MISC_FEATURE (2)..(2): Xaa is AIB
  MISC_FEATURE (3)..(3): Xaa is Gln or Gln analog
  MISC_FEATURE (10)..(10): Xaa is Tyr or an amino acid acylated or alkylated, optionally, via a spacer
  MISC_FEATURE (16)..(16): Xaa is any amino acid, optionally, any amino acid other than Gly, Pro, and Ser
  MISC_FEATURE (18)..(18): Xaa is Arg or Ala
  MISC_FEATURE (20)..(20): Xaa is a negative charged amino acid or a charge-neutral amino acid, optionally, AIB or Gln
  MISC_FEATURE (21)..(21): Xaa is is an acidic amino acid, optionally, Asp or Glu
  MISC_FEATURE (27)..(27): Xaa is Leu, Ala, Nle, or Met
  MISC_FEATURE (28)..(28): Xaa is Ala or an acidic amino acid, optionally, Asp or Glu
  MISC_FEATURE (29)..(29): Xaa is Ala or Gly
  MISC_FEATURE (35)..(35): Xaa is Ala or a basic amino acid, optionally, Arg or Lys
  MISC_FEATURE (39)..(39): C-terminal amidation

SEQ ID NO: 2461 - protein, 39 aa, Artificial Sequence; identical to SEQ ID NO: 2228
  Synthetic peptide
  MISC_FEATURE (2)..(2): Xaa is AIB
  MISC_FEATURE (10)..(10): Xaa is Tyr or an amino acid acylated or alkylated, optionally, via a spacer
  MISC_FEATURE (16)..(16): Xaa is Glu, an alpha, alpha disubstituted amino acid or Lys
  MISC_FEATURE (18)..(18): Xaa is Arg or Ala
  MISC_FEATURE (20)..(20): Xaa is AIB or Gln
  MISC_FEATURE (21)..(21): Xaa is Asp or Glu
  MISC_FEATURE (27)..(27): Xaa is Leu, Nle, or Met
  MISC_FEATURE (28)..(28): Xaa is Ala, Asp or Glu
  MISC_FEATURE (29)..(29): Xaa is Gly or Thr
  MISC_FEATURE (39)..(39): C-terminal amidation

SEQ ID NO: 2462 - protein, 29 aa, Artificial Sequence
  Synthetic peptide
  MISC_FEATURE (2)..(2): Xaa is AIB
  MISC_FEATURE (3)..(3): Xaa is Gln or Gln analog
  MISC_FEATURE (10)..(10): Xaa is Tyr or an amino acid acylated or alkylated, optionally, via a spacer
  MISC_FEATURE (16)..(16): Xaa is any amino acid, optionally, any amino acid other than Gly, Pro, and Ser
  MISC_FEATURE (18)..(18): Xaa is Arg or Ala
  MISC_FEATURE (20)..(20): Xaa is a negative charged amino acid or a charge-neutral amino acid, optionally, AIB or Gln
  MISC_FEATURE (21)..(21): Xaa is an acidic amino acid, optionally, Asp or Glu
  MISC_FEATURE (27)..(27): Xaa is Leu, Ala, Nle, or Met
  MISC_FEATURE (28)..(28): Xaa is Ala or an acidic amino acid, optionally, Asp or Glu
  MISC_FEATURE (29)..(29): Xaa is Ala, Gly or Thr
  MISC_FEATURE (29)..(29): C-terminal amidation
HXXGTFTSDXSKYLDXRXAXXFVQWLXXX

SEQ ID NO: 2463 - protein, 29 aa, Artificial Sequence
  Synthetic peptide
  MISC_FEATURE (2)..(2): Xaa is AIB
  MISC_FEATURE (10)..(10): Xaa is Tyr or an amino acid acylated or alkylated, optionally, via a spacer
  MISC_FEATURE (16)..(16): Xaa is Glu, alpha, alpha-disubstituted amino acid, or Lys
  MISC_FEATURE (18)..(18): Xaa is Arg or Ala
  MISC_FEATURE (20)..(20): Xaa is a negative charged amino acid or a charge-neutral amino acid, optionally, AIB or Gln
  MISC_FEATURE (21)..(21): Xaa is Asp or Glu
  MISC_FEATURE (27)..(27): Xaa is Leu, Ala, Nle, or Met
  MISC_FEATURE (28)..(28): Xaa is Ala, Asp or Glu
  MISC_FEATURE (29)..(29): Xaa is Gly or Thr
  MISC_FEATURE (29)..(29): C-terminal amidation
HXQGTFTSDXSKYLDXRXAXXFVQWLXXX

SEQ ID NO: 2464 - protein, 39 aa, Artificial Sequence; identical to SEQ ID NO: 2227
  Synthetic peptide
  MISC_FEATURE (2)..(2): Xaa is AIB
  MISC_FEATURE (3)..(3): Xaa is an acidic, basic or hydrophobic amino acid, optionally, Glu
  MISC_FEATURE (10)..(10): Xaa is Tyr or an amino acid acylated or alkylated, optionally, via a spacer
  MISC_FEATURE (16)..(16): Xaa can be any amino acid, optionally any amino acid other than Gly, Pro or Ser
  MISC_FEATURE (18)..(18): Xaa is Arg or Ala
  MISC_FEATURE (20)..(20): Xaa is a negative charged amino acid or a charge-neutral amino acid, optionally, AIB or Gln
  MISC_FEATURE (21)..(21): Xaa is an acidic amino acid, optionally, Asp or Glu
  MISC_FEATURE (27)..(27): Xaa is Leu, Ala, Nle, or Met
  MISC_FEATURE (28)..(28): Xaa is Ala or an acidic amino acid, optionally, Asp or Glu
  MISC_FEATURE (29)..(29): Xaa is Ala or Gly
  MISC_FEATURE (35)..(35): Xaa is Ala or a basic amino acid, optionally, Arg or Lys
  MISC_FEATURE (39)..(39): C-terminal amidation

SEQ ID NO: 2465 - protein, 39 aa, Artificial Sequence; identical to SEQ ID NO: 2232
  Synthetic peptide
  MISC_FEATURE (2)..(2): Xaa is AIB
  MISC_FEATURE (10)..(10): Xaa is Tyr or an amino acid acylated or alkylated, optionally, via a spacer
  MISC_FEATURE (16)..(16): Xaa is Glu, an alpha, alpha disubstituted amino acid or Lys
  MISC_FEATURE (18)..(18): Xaa is Arg or Ala
  MISC_FEATURE (20)..(20): Xaa is AIB or Gln
  MISC_FEATURE (21)..(21): Xaa is Asp or Glu
  MISC_FEATURE (27)..(27): Xaa is Leu, Nle, or Met
  MISC_FEATURE (28)..(28): Xaa is Ala, Asp or Glu
  MISC_FEATURE (29)..(29): Xaa is Gly or Thr
  MISC_FEATURE (39)..(39): C-terminal amidation

SEQ ID NO: 2466 - protein, 29 aa, Artificial Sequence
  Synthetic peptide
  MISC_FEATURE (2)..(2): Xaa is AIB
  MISC_FEATURE (3)..(3): Xaa is an acidic, basic or hydrophobic amino acid, optionally, is Glu
  MISC_FEATURE (10)..(10): Xaa is Tyr or an amino acid acylated or alkylated, optionally, via a spacer
  MISC_FEATURE (16)..(16): Xaa is any amino acid, optionally, any amino acid other than Gly, Pro, and Ser
  MISC_FEATURE (18)..(18): Xaa is Arg or Ala
  MISC_FEATURE (20)..(20): Xaa is a negative charged amino acid or a charge-neutral amino acid, optionally, AIB or Gln
  MISC_FEATURE (21)..(21): Xaa is an acidic amino acid, optionally, Asp or Glu
  MISC_FEATURE (27)..(27): Xaa is Leu, Ala, Nle, or Met
  MISC_FEATURE (28)..(28): Xaa is Ala or an acidic amino acid, optionally, Asp or Glu
  MISC_FEATURE (29)..(29): Xaa is Ala, Gly or Thr
  MISC_FEATURE (29)..(29): C-terminal amidation
HXXGTFTSDXSKYLDXRXAXXFVQWLXXX

SEQ ID NO: 2467 - protein, 29 aa, Artificial Sequence
  Synthetic peptide
  MISC_FEATURE (2)..(2): Xaa is AIB
  MISC_FEATURE (10)..(10): Xaa is Tyr or an amino acid acylated or alkylated, optionally, via a spacer
  MISC_FEATURE (16)..(16): Xaa is Glu, alpha, alpha-disubstituted amino acid, or Lys
  MISC_FEATURE (18)..(18): Xaa is Arg or Ala
  MISC_FEATURE (20)..(20): Xaa is a negative charged amino acid or a charge-neutral amino acid, optionally, AIB or Gln
  MISC_FEATURE (21)..(21): Xaa is Asp or Glu
  MISC_FEATURE (27)..(27): Xaa is Leu, Ala, Nle, or Met
  MISC_FEATURE (28)..(28): Xaa is Ala, Asp or Glu
  MISC_FEATURE (29)..(29): Xaa is Gly or Thr
  MISC_FEATURE (29)..(29): C-terminal amidation
HXEGTFTSDXSKYLDXRXAXXFVQWLXXX

SEQ ID NO: 2468 - protein, 39 aa, Artificial Sequence; identical to SEQ ID NO: 2227
  Synthetic peptide
  MISC_FEATURE (2)..(2): Xaa is AIB
  MISC_FEATURE (3)..(3): Xaa is Gln or Gln analog or acidic, basic or hydrophobic amino acid, optionally, is Glu or Gln
  MISC_FEATURE (10)..(10): Xaa is Tyr or an amino acid acylated or alkylated, optionally, via a spacer
  MISC_FEATURE (16)..(16): Xaa is any amino acid, optionally, any amino acid other than Gly, Pro, and Ser
  MISC_FEATURE (18)..(18): Xaa is Arg or Ala
  MISC_FEATURE (20)..(20): Xaa is a negative charged amino acid or a charge-neutral amino acid, optionally, AIB or Gln
  MISC_FEATURE (21)..(21): Xaa is an acidic amino acid, optionally, Asp or Glu
  MISC_FEATURE (27)..(27): Xaa is Leu, Ala, Nle, or Met
  MISC_FEATURE (28)..(28): Xaa is Ala or an acidic amino acid, optionally, Asp or Glu
  MISC_FEATURE (29)..(29): Xaa is Ala or Gly
  MISC_FEATURE (35)..(35): Xaa is Ala or a basic amino acid, optionally, Arg or Lys
  MISC_FEATURE (39)..(39): C-terminal amidation

SEQ ID NO: 2469 - protein, 39 aa, Artificial Sequence; identical to SEQ ID NO: 2236
  Synthetic peptide
  MISC_FEATURE (2)..(2): Xaa is AIB
  MISC_FEATURE (3)..(3): Xaa is Gln or Gln analog or acidic, basic or hydrophobic amino acid, optionally, is Glu or Gln
  MISC_FEATURE (10)..(10): Xaa is Tyr or an amino acid acylated or alkylated, optionally, via a spacer
  MISC_FEATURE (16)..(16): Xaa is Glu, an alpha, alpha disubstituted amino acid or Lys
  MISC_FEATURE (18)..(18): Xaa is Arg or Ala
  MISC_FEATURE (20)..(20): Xaa is AIB or Gln
  MISC_FEATURE (21)..(21): Xaa is Asp or Glu
  MISC_FEATURE (27)..(27): Xaa is Leu, Nle, or Met
  MISC_FEATURE (28)..(28): Xaa is Ala, Asp or Glu
  MISC_FEATURE (29)..(29): Xaa is Gly or Thr
  MISC_FEATURE (39)..(39): C-terminal amidation

SEQ ID NO: 2470 - protein, 29 aa, Artificial Sequence
  Synthetic peptide
  MISC_FEATURE (2)..(2): Xaa is AIB
  MISC_FEATURE (3)..(3): Xaa is Gln or Gln analog or acidic, basic or hydrophobic amino acid, optionally, is Glu or Gln
  MISC_FEATURE (10)..(10): Xaa is Tyr or an amino acid acylated or alkylated, optionally, via a spacer
  MISC_FEATURE (16)..(16): Xaa is any amino acid, optionally, any amino acid other than Gly, Pro, and Ser
  MISC_FEATURE (18)..(18): Xaa is Arg or Ala
  MISC_FEATURE (20)..(20): Xaa is a negative charged amino acid or a charge-neutral amino acid, optionally, AIB or Gln
  MISC_FEATURE (21)..(21): Xaa is an acidic amino acid, optionally, Asp or Glu
  MISC_FEATURE (27)..(27): Xaa is Leu, Ala, Nle, or Met
  MISC_FEATURE (28)..(28): Xaa is Ala or an acidic amino acid, optionally, Asp or Glu
  MISC_FEATURE (29)..(29): Xaa is Ala, Gly or Thr
  MISC_FEATURE (29)..(29): C-terminal amidation
HXXGTFTSDXSKYLDXRXAXXFVQWLXXX

SEQ ID NO: 2471 - protein, 29 aa, Artificial Sequence
  Synthetic peptide
  MISC_FEATURE (2)..(2): Xaa is AIB
  MISC_FEATURE (3)..(3): Xaa is Gln or Gln analog or acidic, basic or hydrophobic amino acid, optionally, is Glu or Gln
  MISC_FEATURE (10)..(10): Xaa is Tyr or an amino acid acylated or alkylated, optionally, via a spacer
  MISC_FEATURE (16)..(16): Xaa is Glu, alpha, alpha-disubstituted amino acid, or Lys
  MISC_FEATURE (18)..(18): Xaa is Arg or Ala
  MISC_FEATURE (20)..(20): Xaa is a negative charged amino acid or a charge-neutral amino acid, optionally, AIB or Gln
  MISC_FEATURE (21)..(21): Xaa is Asp or Glu
  MISC_FEATURE (27)..(27): Xaa is Leu, Ala, Nle, or Met
  MISC_FEATURE (28)..(28): Xaa is Ala, Asp or Glu
  MISC_FEATURE (29)..(29): Xaa is Gly or Thr
  MISC_FEATURE (29)..(29): C-terminal amidation
HXXGTFTSDXSKYLDXRXAXXFVQWLXXX

SEQ ID NO: 2472 - protein, 41 aa, Artificial Sequence; identical to SEQ ID NO: 2051
  Synthetic peptide
  MISC_FEATURE (2)..(2): Xaa is AIB
  MISC_FEATURE (40)..(40): Acylated or alkylated, optionally, via a spacer
  MISC_FEATURE (41)..(41): C-terminal amidation

SEQ ID NO: 2473 - protein, 41 aa, Artificial Sequence; identical to SEQ ID NO: 2052
  Synthetic peptide
  MISC_FEATURE (2)..(2): Xaa is AIB
  MISC_FEATURE (40)..(40): Acylated or alkylated, optionally, via a spacer
  MISC_FEATURE (41)..(41): C-terminal amidation

SEQ ID NO: 2474 - protein, 40 aa, Artificial Sequence; identical to SEQ ID NO: 2241
  Synthetic peptide
  MISC_FEATURE (2)..(2): Xaa is AIB
  MISC_FEATURE (10)..(10): Acylated or alkylated, optionally, via a spacer
  MISC_FEATURE (40)..(40): C-terminal amidation

SEQ ID NO: 2475 - protein, 39 aa, Artificial Sequence; identical to SEQ ID NO: 2242
  Synthetic peptide
  MISC_FEATURE (2)..(2): Xaa is AIB
  MISC_FEATURE (10)..(10): Acylated or alkylated, optionally, via a spacer
  MISC_FEATURE (39)..(39): C-terminal amidation

SEQ ID NO: 2476 - protein, 40 aa, Artificial Sequence; identical to SEQ ID NO: 2241
  Synthetic peptide
  MISC_FEATURE (2)..(2): Xaa is AIB
  MISC_FEATURE (10)..(10): Acylated or alkylated, optionally, via a spacer
  MISC_FEATURE (40)..(40): C-terminal amidation

SEQ ID NO: 2477 - protein, 41 aa, Artificial Sequence; identical to SEQ ID NO: 2244
  Synthetic peptide
  MISC_FEATURE (2)..(2): Xaa is AIB
  MISC_FEATURE (40)..(40): Acylated or alkylated, optionally, via a spacer
  MISC_FEATURE (41)..(41): C-terminal amidation

SEQ ID NO: 2478 - protein, 41 aa, Artificial Sequence; identical to SEQ ID NO: 2244
  Synthetic peptide
  MISC_FEATURE (2)..(2): Xaa is AIB
  MISC_FEATURE (40)..(40): Acylated or alkylated, optionally, via a spacer
  MISC_FEATURE (41)..(41): C-terminal amidation

SEQ ID NO: 2479 - protein, 41 aa, Artificial Sequence; identical to SEQ ID NO: 2244
  Synthetic peptide
  MISC_FEATURE (2)..(2): Xaa is AIB
  MISC_FEATURE (40)..(40): Acylated or alkylated, optionally, via a spacer
  MISC_FEATURE (41)..(41): C-terminal amidation

SEQ ID NO: 2480 - protein, 41 aa, Artificial Sequence; identical to SEQ ID NO: 2247
  Synthetic peptide
  MISC_FEATURE (2)..(2): Xaa is AIB
  MISC_FEATURE (40)..(40): Acylated or alkylated, optionally, via a spacer
  MISC_FEATURE (41)..(41): C-terminal amidation

SEQ ID NO: 2481 - protein, 40 aa, Artificial Sequence; identical to SEQ ID NO: 1165
  Synthetic peptide
  MISC_FEATURE: MT-345
  MOD_RES (2)..(2): Xaa is AIB
  MOD_RES (40)..(40): Acylated or alkylated, optionally, via a spacer
  MOD_RES (40)..(40): C-terminal amidation

SEQ ID NO: 2482 - protein, 40 aa, Artificial Sequence; identical to SEQ ID NO: 2249
  Synthetic peptide
  MISC_FEATURE: MT-347
  MOD_RES (2)..(2): Xaa is AIB
  MOD_RES (16)..(16): Xaa is AIB
  MOD_RES (40)..(40): Acylated or alkylated, optionally, via a spacer
  MOD_RES (40)..(40): C-terminal amidation

SEQ ID NO: 2483 - protein, 40 aa, Artificial Sequence; identical to SEQ ID NO: 1165
  Synthetic peptide
  MISC_FEATURE: MT-349
  MOD_RES (2)..(2): Xaa is AIB
  MOD_RES (24)..(24): Covalently bound to 40kDa PEG via thioether made by reaction of peptide with haloacetyl-activated PEG
  MOD_RES (40)..(40): Acylated or alkylated, optionally, via a spacer
  MOD_RES (40)..(40): C-terminal amidation

SEQ ID NO: 2484 - protein, 40 aa, Artificial Sequence; identical to SEQ ID NO: 2249
  Synthetic peptide
  MISC_FEATURE: MT-351
  MOD_RES (2)..(2): Xaa is AIB
  MOD_RES (16)..(16): Xaa is AIB
  MOD_RES (24)..(24): Covalently bound to 40kDa PEG via thioether made by reaction of peptide with haloacetyl-activated PEG
  MOD_RES (40)..(40): Acylated or alkylated, optionally, via a spacer
  MOD_RES (40)..(40): C-terminal amidation

SEQ ID NO: 2485 - protein, 40 aa, Artificial Sequence; identical to SEQ ID NO: 2252
  Synthetic peptide
  MISC_FEATURE: MT-364
  MOD_RES (2)..(2): Xaa is AIB
  MOD_RES (40)..(40): Acylated or alkylated, optionally, via a spacer
  MOD_RES (40)..(40): C-terminal amidation

SEQ ID NO: 2486 - protein, 39 aa, Artificial Sequence; identical to SEQ ID NO: 1198
  Synthetic peptide
  MISC_FEATURE (2)..(2): Xaa is AIB
  MISC_FEATURE (10)..(10): Xaa is 4-amino-Phe
  MISC_FEATURE (10)..(10): Acylated or alkylated, optionally, via a spacer
  MISC_FEATURE (20)..(20): Xaa is AIB
  MISC_FEATURE (39)..(39): C-terminal amidation

SEQ ID NO: 2487 - protein, 41 aa, Artificial Sequence; identical to SEQ ID NO: 2193
  Synthetic peptide
  MISC_FEATURE (2)..(2): Xaa is AIB
  MISC_FEATURE (40)..(40): Xaa is 4-amino-Phe
  MISC_FEATURE (40)..(40): Acylated or alkylated, optionally, via a spacer
  MISC_FEATURE (41)..(41): C-terminal amidation

SEQ ID NO: 2488 - protein, 39 aa, Artificial Sequence; identical to SEQ ID NO: 2195
  Synthetic peptide
  MISC_FEATURE (2)..(2): Xaa is AIB
  MISC_FEATURE (6)..(6): Xaa is 4-amino-Phe
  MISC_FEATURE (6)..(6): Acylated or alkylated, optionally, via a spacer
  MISC_FEATURE (39)..(39): C-terminal amidation

SEQ ID NO: 2489 - protein, 39 aa, Artificial Sequence; identical to SEQ ID NO: 2196
  Synthetic peptide
  MISC_FEATURE (2)..(2): Xaa is AIB
  MISC_FEATURE (10)..(10): Xaa is 4-amino-Phe
  MISC_FEATURE (10)..(10): Acylated or alkylated, optionally, via a spacer
  MISC_FEATURE (39)..(39): C-terminal amidation

SEQ ID NO: 2490 - protein, 39 aa, Artificial Sequence; identical to SEQ ID NO: 2197
  Synthetic peptide
  MISC_FEATURE (2)..(2): Xaa is AIB
  MISC_FEATURE (13)..(13): Xaa is 4-amino-Phe
  MISC_FEATURE (13)..(13): Acylated or alkylated, optionally, via a spacer
  MISC_FEATURE (39)..(39): C-terminal amidation

SEQ ID NO: 2491 - protein, 39 aa, Artificial Sequence; identical to SEQ ID NO: 2199
  Synthetic peptide
  MOD_RES (2)..(2): Xaa is AIB
  MOD_RES (13)..(13): Acylated or alkylated, optionally, via a spacer
  MOD_RES (39)..(39): C-terminal amidation

SEQ ID NO: 2492 - protein, 39 aa, Artificial Sequence; identical to SEQ ID NO: 2200
  Synthetic peptide
  MISC_FEATURE (2)..(2): Xaa is AIB
  MISC_FEATURE (14)..(14): Acylated or alkylated, optionally, via a spacer
  MISC_FEATURE (39)..(39): C-terminal amidation

SEQ ID NO: 2493 - protein, 39 aa, Artificial Sequence; identical to SEQ ID NO: 2201
  Synthetic peptide
  MISC_FEATURE (2)..(2): Xaa is AIB
  MISC_FEATURE (16)..(16): Acylated or alkylated, optionally, via a spacer
  MISC_FEATURE (39)..(39): C-terminal amidation

SEQ ID NO: 2494 - protein, 39 aa, Artificial Sequence; identical to SEQ ID NO: 2202
  Synthetic peptide
  MISC_FEATURE (2)..(2): Xaa is AIB
  MISC_FEATURE (17)..(17): Acylated or alkylated, optionally, via a spacer
  MISC_FEATURE (39)..(39): C-terminal amidation

SEQ ID NO: 2495 - protein, 41 aa, Artificial Sequence; identical to SEQ ID NO: 2011
  Synthetic peptide
  MISC_FEATURE (2)..(2): Xaa is AIB
  MISC_FEATURE (40)..(40): Acylated or alkylated, optionally, via a spacer
  MISC_FEATURE (41)..(41): C-terminal amidation

SEQ ID NO: 2496 - protein, 41 aa, Artificial Sequence; identical to SEQ ID NO: 2011
  Synthetic peptide
  MISC_FEATURE (2)..(2): Xaa is AIB
  MISC_FEATURE (40)..(40): Acylated or alkylated, optionally, via a spacer
  MISC_FEATURE (41)..(41): C-terminal amidation

SEQ ID NO: 2497 - protein, 41 aa, Artificial Sequence; identical to SEQ ID NO: 2011
  Synthetic peptide
  MISC_FEATURE (2)..(2): Xaa is AIB
  MISC_FEATURE (40)..(40): Acylated or alkylated, optionally, via a spacer
  MISC_FEATURE (41)..(41): C-terminal amidation

SEQ ID NO: 2498 - protein, 41 aa, Artificial Sequence; identical to SEQ ID NO: 2011
  Synthetic peptide
  MISC_FEATURE (2)..(2): Xaa is AIB
  MISC_FEATURE (40)..(40): Acylated or alkylated, optionally, via a spacer
  MISC_FEATURE (41)..(41): C-terminal amidation

SEQ ID NO: 2499 - protein, 39 aa, Artificial Sequence; identical to SEQ ID NO: 2010
  Synthetic peptide
  MISC_FEATURE (2)..(2): Xaa is AIB
  MISC_FEATURE (10)..(10): Acylated or alkylated, optionally, via a spacer
  MISC_FEATURE (39)..(39): C-terminal amidation

SEQ ID NO: 2500 - protein, 40 aa, Artificial Sequence; identical to SEQ ID NO: 2209
  Synthetic peptide
  MISC_FEATURE (2)..(2): Xaa is AIB
  MISC_FEATURE (40)..(40): Acylated or alkylated, optionally, via a spacer
  MISC_FEATURE (40)..(40): C-terminal amidation

SEQ ID NO: 2501 - protein, 39 aa, Artificial Sequence; identical to SEQ ID NO: 2010
  Synthetic peptide
  MISC_FEATURE (2)..(2): Xaa is AIB
  MISC_FEATURE (10)..(10): Acylated or alkylated, optionally, via a spacer
  MISC_FEATURE (39)..(39): C-terminal amidation

SEQ ID NO: 2502 - protein, 40 aa, Artificial Sequence; identical to SEQ ID NO: 2211
  Synthetic peptide
  MISC_FEATURE (2)..(2): Xaa is AIB
  MISC_FEATURE (10)..(10): Acylated or alkylated, optionally, via a spacer
  MISC_FEATURE (40)..(40): Acylated or alkylated, optionally, via a spacer
  MISC_FEATURE (40)..(40): C-terminal amidation

SEQ ID NO: 2503 - protein, 41 aa, Artificial Sequence; identical to SEQ ID NO: 2011
  Synthetic peptide
  MISC_FEATURE (2)..(2): Xaa is AIB
  MISC_FEATURE (40)..(40): Acylated or alkylated, optionally, via a spacer
  MISC_FEATURE (41)..(41): C-terminal amidation

SEQ ID NO: 2504 - protein, 41 aa, Artificial Sequence; identical to SEQ ID NO: 2011
  Synthetic peptide
  MISC_FEATURE (2)..(2): Xaa is AIB
  MISC_FEATURE (40)..(40): Acylated or alkylated, optionally, via a spacer
  MISC_FEATURE (41)..(41): C-terminal amidation

SEQ ID NO: 2505 - protein, 41 aa, Artificial Sequence; identical to SEQ ID NO: 2011
  Synthetic peptide
  MISC_FEATURE (2)..(2): Xaa is AIB
  MISC_FEATURE (40)..(40): Acylated or alkylated, optionally, via a spacer
  MISC_FEATURE (41)..(41): C-terminal amidation

SEQ ID NO: 2506 - protein, 41 aa, Artificial Sequence; identical to SEQ ID NO: 2011
  Synthetic peptide
  MISC_FEATURE (2)..(2): Xaa is AIB
  MISC_FEATURE (40)..(40): Acylated or alkylated, optionally, via a spacer
  MISC_FEATURE (41)..(41): C-terminal amidation

SEQ ID NO: 2507 - protein, 41 aa, Artificial Sequence; identical to SEQ ID NO: 2216
  Synthetic peptide
  MISC_FEATURE (2)..(2): Xaa is AIB
  MISC_FEATURE (40)..(40): Acylated or alkylated, optionally, via a spacer
  MISC_FEATURE (41)..(41): C-terminal amidation

SEQ ID NO: 2508 - protein, 41 aa, Artificial Sequence; identical to SEQ ID NO: 2011
  Synthetic peptide
  MISC_FEATURE (2)..(2): Xaa is AIB
  MISC_FEATURE (40)..(40): Acylated or alkylated, optionally, via a spacer
  MISC_FEATURE (41)..(41): C-terminal amidation

SEQ ID NO: 2509 - protein, 41 aa, Artificial Sequence; identical to SEQ ID NO: 2051
  Synthetic peptide
  MISC_FEATURE (2)..(2): Xaa is AIB
  MISC_FEATURE (40)..(40): Acylated or alkylated, optionally, via a spacer
  MISC_FEATURE (41)..(41): C-terminal amidation

SEQ ID NO: 2510 - protein, 41 aa, Artificial Sequence; identical to SEQ ID NO: 2052
  Synthetic peptide
  MISC_FEATURE (2)..(2): Xaa is AIB
  MISC_FEATURE (40)..(40): Acylated or alkylated, optionally, via a spacer
  MISC_FEATURE (41)..(41): C-terminal amidation

SEQ ID NO: 2511 - protein, 40 aa, Artificial Sequence; identical to SEQ ID NO: 2241
  Synthetic peptide
  MISC_FEATURE (2)..(2): Xaa is AIB
  MISC_FEATURE (10)..(10): Acylated or alkylated, optionally, via a spacer
  MISC_FEATURE (40)..(40): C-terminal amidation

SEQ ID NO: 2512 - protein, 39 aa, Artificial Sequence; identical to SEQ ID NO: 2242
  Synthetic peptide
  MISC_FEATURE (2)..(2): Xaa is AIB
  MISC_FEATURE (10)..(10): Acylated or alkylated, optionally, via a spacer
  MISC_FEATURE (39)..(39): C-terminal amidation

SEQ ID NO: 2513 - protein, 40 aa, Artificial Sequence; identical to SEQ ID NO: 2241
  Synthetic peptide
  MISC_FEATURE (2)..(2): Xaa is AIB
  MISC_FEATURE (10)..(10): Acylated or alkylated, optionally, via a spacer
  MISC_FEATURE (40)..(40): C-terminal amidation

SEQ ID NO: 2514 - protein, 41 aa, Artificial Sequence; identical to SEQ ID NO: 2244
  Synthetic peptide
  MISC_FEATURE (2)..(2): Xaa is AIB
  MISC_FEATURE (40)..(40): Acylated or alkylated, optionally, via a spacer
  MISC_FEATURE (41)..(41): C-terminal amidation

SEQ ID NO: 2515 - protein, 41 aa, Artificial Sequence; identical to SEQ ID NO: 2011
  Synthetic peptide
  MISC_FEATURE (2)..(2): Xaa is AIB
  MISC_FEATURE (41)..(41): C-terminal amidation

SEQ ID NO: 2516 - protein, 41 aa, Artificial Sequence; identical to SEQ ID NO: 2015
  Synthetic peptide
  MISC_FEATURE (2)..(2): Xaa is AIB
  MISC_FEATURE (40)..(40): Acylated or alkylated, optionally, via a spacer
  MISC_FEATURE (41)..(41): C-terminal amidation

SEQ ID NO: 2517 - protein, 41 aa, Artificial Sequence; identical to SEQ ID NO: 2016
  Synthetic peptide
  MISC_FEATURE (2)..(2): Xaa is AIB
  MISC_FEATURE (40)..(40): Acylated or alkylated, optionally, via a spacer
  MISC_FEATURE (41)..(41): C-terminal amidation

SEQ ID NO: 2518 - protein, 41 aa, Artificial Sequence; identical to SEQ ID NO: 2017
  Synthetic peptide
  MISC_FEATURE (2)..(2): Xaa is AIB
  MISC_FEATURE (40)..(40): Acylated or alkylated, optionally, via a spacer
  MISC_FEATURE (41)..(41): C-terminal amidation

SEQ ID NO: 2519 - protein, 39 aa, Artificial Sequence; identical to SEQ ID NO: 2286
  Synthetic peptide
  MISC_FEATURE (2)..(2): Xaa is AIB
  MISC_FEATURE (10)..(10): Acylated or alkylated, optionally, via a spacer
  MISC_FEATURE (39)..(39): C-terminal amidation

SEQ ID NO: 2520 - protein, 39 aa, Artificial Sequence; identical to SEQ ID NO: 2019
  Synthetic peptide
  MISC_FEATURE (2)..(2): Xaa is AIB
  MISC_FEATURE (10)..(10): Acylated or alkylated, optionally, via a spacer
  MISC_FEATURE (39)..(39): C-terminal amidation

SEQ ID NO: 2521 - protein, 39 aa, Artificial Sequence; identical to SEQ ID NO: 2020
  Synthetic peptide
  MOD_RES (2)..(2): Xaa is AIB
  MOD_RES (10)..(10): Acylated or alkylated, optionally, via a spacer
  MOD_RES (39)..(39): C-terminal amidation

SEQ ID NO: 2522 - protein, 39 aa, Artificial Sequence; identical to SEQ ID NO: 2021
  Synthetic peptide
  MISC_FEATURE (2)..(2): Xaa is AIB
  MISC_FEATURE (10)..(10): Acylated or alkylated, optionally, via a spacer
  MISC_FEATURE (20)..(20): Xaa is AIB
  MISC_FEATURE (39)..(39): C-terminal amidation

SEQ ID NO: 2523 - protein, 39 aa, Artificial Sequence; identical to SEQ ID NO: 2022
  Synthetic peptide
  MISC_FEATURE (2)..(2): Xaa is AIB
  MISC_FEATURE (10)..(10): Acylated or alkylated, optionally, via a spacer
  MISC_FEATURE (20)..(20): Xaa is AIB
  MISC_FEATURE (39)..(39): C-terminal amidation

SEQ ID NO: 2524 - protein, 39 aa, Artificial Sequence; identical to SEQ ID NO: 2023
  Synthetic peptide
  MISC_FEATURE (2)..(2): Xaa is AIB
  MISC_FEATURE (10)..(10): Acylated or alkylated, optionally, via a spacer
  MISC_FEATURE (19)..(19): Xaa is AIB
  MISC_FEATURE (39)..(39): C-terminal amidation

SEQ ID NO: 2525 - protein, 39 aa, Artificial Sequence; identical to SEQ ID NO: 2024
  Synthetic peptide
  MISC_FEATURE (2)..(2): Xaa is AIB
  MISC_FEATURE (10)..(10): Acylated or alkylated, optionally, via a spacer
  MISC_FEATURE (16)..(16): Xaa is AIB
  MISC_FEATURE (20)..(20): Xaa is AIB
  MISC_FEATURE (39)..(39): C-terminal amidation

SEQ ID NO: 2526 - protein, 39 aa, Artificial Sequence; identical to SEQ ID NO: 2025
  Synthetic peptide
  MISC_FEATURE (2)..(2): Xaa is AIB
  MISC_FEATURE (10)..(10): Acylated or alkylated, optionally, via a spacer
  MISC_FEATURE (20)..(20): Xaa is AIB
  MISC_FEATURE (39)..(39): C-terminal amidation

SEQ ID NO: 2527 - protein, 39 aa, Artificial Sequence; identical to SEQ ID NO: 2026
  Synthetic peptide
  MISC_FEATURE (2)..(2): Xaa is AIB
  MISC_FEATURE (10)..(10): Acylated or alkylated, optionally, via a spacer
  MISC_FEATURE (20)..(20): Xaa is AIB
  MISC_FEATURE (39)..(39): C-terminal amidation

SEQ ID NO: 2528 - protein, 39 aa, Artificial Sequence; identical to SEQ ID NO: 2027
  Synthetic peptide
  MISC_FEATURE (2)..(2): Xaa is AIB
  MISC_FEATURE (10)..(10): Acylated or alkylated, optionally, via a spacer
  MISC_FEATURE (19)..(19): Xaa is AIB
  MISC_FEATURE (39)..(39): C-terminal amidation

SEQ ID NO: 2529 - protein, 39 aa, Artificial Sequence; identical to SEQ ID NO: 2028
  Synthetic peptide
  MISC_FEATURE (2)..(2): Xaa is AIB
  MISC_FEATURE (10)..(10): Acylated or alkylated, optionally, via a spacer
  MISC_FEATURE (20)..(20): Xaa is AIB
  MISC_FEATURE (39)..(39): C-terminal amidation

SEQ ID NO: 2530 - protein, 39 aa, Artificial Sequence; identical to SEQ ID NO: 2029
  Synthetic peptide
  MISC_FEATURE (2)..(2): Xaa is AIB
  MISC_FEATURE (10)..(10): Acylated or alkylated, optionally, via a spacer
  MISC_FEATURE (39)..(39): C-terminal amidation

SEQ ID NO: 2531 - protein, 39 aa, Artificial Sequence; identical to SEQ ID NO: 2030
  Synthetic peptide
  MISC_FEATURE (2)..(2): Xaa is AIB
  MISC_FEATURE (10)..(10): Acylated or alkylated, optionally, via a spacer
  MISC_FEATURE (39)..(39): C-terminal amidation

SEQ ID NO: 2532 - protein, 39 aa, Artificial Sequence; identical to SEQ ID NO: 2031
  Synthetic peptide
  MISC_FEATURE (2)..(2): Xaa is AIB
  MISC_FEATURE (10)..(10): Acylated or alkylated, optionally, via a spacer
  MISC_FEATURE (39)..(39): C-terminal amidation

SEQ ID NO: 2533 - protein, 39 aa, Artificial Sequence; identical to SEQ ID NO: 2032
  Synthetic peptide
  MISC_FEATURE (2)..(2): Xaa is AIB
  MISC_FEATURE (10)..(10): Acylated or alkylated, optionally, via a spacer
  MISC_FEATURE (39)..(39): C-terminal amidation

SEQ ID NO: 2534 - protein, 39 aa, Artificial Sequence; identical to SEQ ID NO: 2033
  Synthetic peptide
  MISC_FEATURE (2)..(2): Xaa is AIB
  MISC_FEATURE (3)..(3): Xaa is Homoserine
  MISC_FEATURE (10)..(10): Acylated or alkylated, optionally, via a spacer
  MISC_FEATURE (39)..(39): C-terminal amidation

SEQ ID NO: 2535 - protein, 39 aa, Artificial Sequence; identical to SEQ ID NO: 2033
  Synthetic peptide
  MISC_FEATURE (2)..(2): Xaa is AIB
  MISC_FEATURE (3)..(3): Xaa is acetyl ornithine
  MISC_FEATURE (10)..(10): Acylated or alkylated, optionally, via a spacer
  MISC_FEATURE (39)..(39): C-terminal amidation

SEQ ID NO: 2536 - protein, 39 aa, Artificial Sequence; identical to SEQ ID NO: 2035
  Synthetic peptide
  MISC_FEATURE (2)..(2): Xaa is AIB
  MISC_FEATURE (10)..(10): Acylated or alkylated, optionally, via a spacer
  MISC_FEATURE (39)..(39): C-terminal amidation

SEQ ID NO: 2537 - protein, 39 aa, Artificial Sequence; identical to SEQ ID NO: 2033
  Synthetic peptide
  MISC_FEATURE (2)..(2): Xaa is AIB
  MISC_FEATURE (3)..(3): Xaa is acetyl diaminobutanoic acid
  MISC_FEATURE (10)..(10): Acylated or alkylated, optionally, via a spacer
  MISC_FEATURE (39)..(39): C-terminal amidation

SEQ ID NO: 2538 - protein, 39 aa, Artificial Sequence; identical to SEQ ID NO: 2037
  Synthetic peptide
  MISC_FEATURE (2)..(2): Xaa is AIB
  MISC_FEATURE (10)..(10): Acylated or alkylated, optionally, via a spacer
  MISC_FEATURE (39)..(39): C-terminal amidation

SEQ ID NO: 2539 - protein, 39 aa, Artificial Sequence; identical to SEQ ID NO: 2033
  Synthetic peptide
  MISC_FEATURE (2)..(2): Xaa is AIB
  MISC_FEATURE (3)..(3): Xaa is norvaline
  MISC_FEATURE (10)..(10): Acylated or alkylated, optionally, via a spacer
  MISC_FEATURE (39)..(39): C-terminal amidation

SEQ ID NO: 2540 - protein, 39 aa, Artificial Sequence; identical to SEQ ID NO: 2033
  Synthetic peptide
  MISC_FEATURE (2)..(2): Xaa is AIB
  MISC_FEATURE (3)..(3): Xaa is acetyl lysine
  MISC_FEATURE (10)..(10): Acylated or alkylated, optionally, via a spacer
  MISC_FEATURE (39)..(39): C-terminal amidation

SEQ ID NO: 2541 - protein, 39 aa, Artificial Sequence; identical to SEQ ID NO: 2033
  Synthetic peptide
  MISC_FEATURE (2)..(2): Xaa is AIB
  MISC_FEATURE (3)..(3): Xaa is norleucine
  MISC_FEATURE (10)..(10): Acylated or alkylated, optionally, via a spacer
  MISC_FEATURE (39)..(39): C-terminal amidation

SEQ ID NO: 2542 - protein, 39 aa, Artificial Sequence; identical to SEQ ID NO: 2033
  Synthetic peptide
  MISC_FEATURE (2)..(2): Xaa is AIB
  MISC_FEATURE (3)..(3): Xaa is methionine sulfone
  MISC_FEATURE (10)..(10): Acylated or alkylated, optionally, via a spacer
  MISC_FEATURE (39)..(39): C-terminal amidation

SEQ ID NO: 2543 - protein, 39 aa, Artificial Sequence; identical to SEQ ID NO: 2033
  Synthetic peptide
  MISC_FEATURE (2)..(2): Xaa is AIB
  MISC_FEATURE (3)..(3): Xaa is methionine sulfoxide
  MISC_FEATURE (10)..(10): Acylated or alkylated, optionally, via a spacer
  MISC_FEATURE (39)..(39): C-terminal amidation

SEQ ID NO: 2544 - protein, 39 aa, Artificial Sequence; identical to SEQ ID NO: 2043
  Synthetic peptide
  MISC_FEATURE (2)..(2): Xaa is AIB
  MISC_FEATURE (10)..(10): Acylated or alkylated, optionally, via a spacer
  MISC_FEATURE (39)..(39): C-terminal amidation

SEQ ID NO: 2545 - protein, 39 aa, Artificial Sequence; identical to SEQ ID NO: 2044
  Synthetic peptide
  MISC_FEATURE (2)..(2): Xaa is AIB
  MISC_FEATURE (10)..(10): Acylated or alkylated, optionally, via a spacer
  MISC_FEATURE (39)..(39): C-terminal amidation

SEQ ID NO: 2546 - protein, 39 aa, Artificial Sequence; identical to SEQ ID NO: 2045
  Synthetic peptide
  MISC_FEATURE (2)..(2): Xaa is AIB
  MISC_FEATURE (10)..(10): Acylated or alkylated, optionally, via a spacer
  MISC_FEATURE (39)..(39): C-terminal amidation

SEQ ID NO: 2547 - protein, 39 aa, Artificial Sequence; identical to SEQ ID NO: 2046
  Synthetic peptide
  MISC_FEATURE (2)..(2): Xaa is AIB
  MISC_FEATURE (3)..(3): Xaa is methionine sulfoxide
  MISC_FEATURE (10)..(10): Acylated or alkylated, optionally, via a spacer
  MISC_FEATURE (39)..(39): C-terminal amidation

SEQ ID NO: 2548 - protein, 39 aa, Artificial Sequence; identical to SEQ ID NO: 2046
  Synthetic peptide
  MISC_FEATURE (2)..(2): Xaa is AIB
  MISC_FEATURE (3)..(3): Xaa is norvaline
  MISC_FEATURE (10)..(10): Acylated or alkylated, optionally, via a spacer
  MISC_FEATURE (39)..(39): C-terminal amidation

SEQ ID NO: 2549 - protein, 39 aa, Artificial Sequence; identical to SEQ ID NO: 2046
  Synthetic peptide
  MISC_FEATURE (2)..(2): Xaa is AIB
  MISC_FEATURE (3)..(3): Xaa is homoserine
  MISC_FEATURE (10)..(10): Acylated or alkylated, optionally, via a spacer
  MISC_FEATURE (39)..(39): C-terminal amidation

SEQ ID NO: 2550 - protein, 41 aa, Artificial Sequence; identical to SEQ ID NO: 2049
  Synthetic peptide
  MISC_FEATURE (2)..(2): Xaa is AIB
  MISC_FEATURE (40)..(40): Acylated or alkylated, optionally, via a spacer
  MISC_FEATURE (41)..(41): C-terminal amidation

SEQ ID NO: 2551 - protein, 41 aa, Artificial Sequence; identical to SEQ ID NO: 2050
  Synthetic peptide
  MISC_FEATURE (2)..(2): Xaa is AIB
  MISC_FEATURE (40)..(40): Acylated or alkylated, optionally, via a spacer
  MISC_FEATURE (41)..(41): C-terminal amidation

SEQ ID NO: 2552 - protein, 41 aa, Artificial Sequence; identical to SEQ ID NO: 2051
  Synthetic peptide
  MISC_FEATURE (2)..(2): Xaa is AIB
  MISC_FEATURE (40)..(40): Acylated or alkylated, optionally, via a spacer
  MISC_FEATURE (41)..(41): C-terminal amidation

SEQ ID NO: 2553 - protein, 41 aa, Artificial Sequence; identical to SEQ ID NO: 2052
  Synthetic peptide
  MISC_FEATURE (2)..(2): Xaa is AIB
  MISC_FEATURE (40)..(40): Acylated or alkylated, optionally, via a spacer
  MISC_FEATURE (41)..(41): C-terminal amidation

SEQ ID NO: 2554 - protein, 41 aa, Artificial Sequence; identical to SEQ ID NO: 2053
  Synthetic peptide
  MISC_FEATURE (2)..(2): Xaa is AIB
  MISC_FEATURE (40)..(40): Acylated or alkylated, optionally, via a spacer
  MISC_FEATURE (41)..(41): C-terminal amidation

SEQ ID NO: 2555 - protein, 41 aa, Artificial Sequence; identical to SEQ ID NO: 2054
  Synthetic peptide
  MISC_FEATURE (2)..(2): Xaa is AIB
  MISC_FEATURE (40)..(40): Acylated or alkylated, optionally, via a spacer
  MISC_FEATURE (41)..(41): C-terminal amidation

SEQ ID NO: 2556 - protein, 41 aa, Artificial Sequence; identical to SEQ ID NO: 2055
  Synthetic peptide
  MISC_FEATURE (2)..(2): Xaa is AIB
  MISC_FEATURE (40)..(40): Acylated or alkylated, optionally, via a spacer
  MISC_FEATURE (41)..(41): C-terminal amidation

SEQ ID NO: 2557 - protein, 41 aa, Artificial Sequence; identical to SEQ ID NO: 2056
  Synthetic peptide
  MISC_FEATURE (2)..(2): Xaa is AIB
  MISC_FEATURE (40)..(40): Acylated or alkylated, optionally, via a spacer
  MISC_FEATURE (41)..(41): C-terminal amidation

SEQ ID NO: 2558 - protein, 41 aa, Artificial Sequence; identical to SEQ ID NO: 2057
  Synthetic peptide
  MISC_FEATURE (2)..(2): Xaa is AIB
  MISC_FEATURE (40)..(40): Acylated or alkylated, optionally, via a spacer
  MISC_FEATURE (41)..(41): C-terminal amidation

SEQ ID NO: 2559 - protein, 41 aa, Artificial Sequence; identical to SEQ ID NO: 2058
  Synthetic peptide
  MISC_FEATURE (2)..(2): Xaa is AIB
  MISC_FEATURE (40)..(40): Acylated or alkylated, optionally, via a spacer
  MISC_FEATURE (41)..(41): C-terminal amidation

SEQ ID NO: 2560 - protein, 41 aa, Artificial Sequence; identical to SEQ ID NO: 2059
  Synthetic peptide
  MISC_FEATURE (2)..(2): Xaa is AIB
  MISC_FEATURE (40)..(40): Acylated or alkylated, optionally, via a spacer
  MISC_FEATURE (41)..(41): C-terminal amidation

SEQ ID NO: 2561 - protein, 41 aa, Artificial Sequence; identical to SEQ ID NO: 2060
  Synthetic peptide
  MISC_FEATURE (2)..(2): Xaa is AIB
  MISC_FEATURE (40)..(40): Acylated or alkylated, optionally, via a spacer
  MISC_FEATURE (41)..(41): C-terminal amidation

SEQ ID NO: 2562 - protein, 41 aa, Artificial Sequence; identical to SEQ ID NO: 2061
  Synthetic peptide
  MISC_FEATURE (2)..(2): Xaa is AIB
  MISC_FEATURE (40)..(40): Acylated or alkylated, optionally, via a spacer
  MISC_FEATURE (41)..(41): C-terminal amidation

SEQ ID NO: 2563 - protein, 39 aa, Artificial Sequence; identical to SEQ ID NO: 2063
  Synthetic peptide
  MISC_FEATURE (2)..(2): Xaa is AIB
  MISC_FEATURE (10)..(10): Acylated or alkylated, optionally, via a spacer
  MISC_FEATURE (39)..(39): C-terminal amidation

SEQ ID NO: 2564 - protein, 39 aa, Artificial Sequence; identical to SEQ ID NO: 2064
  Synthetic peptide
  MISC_FEATURE (2)..(2): Xaa is AIB
  MISC_FEATURE (10)..(10): Acylated or alkylated, optionally, via a spacer
  MISC_FEATURE (39)..(39): C-terminal amidation

SEQ ID NO: 2565 - protein, 39 aa, Artificial Sequence; identical to SEQ ID NO: 2065
  Synthetic peptide
  MISC_FEATURE (2)..(2): Xaa is AIB
  MISC_FEATURE (10)..(10): Acylated or alkylated, optionally, via a spacer
  MISC_FEATURE (29)..(29): Xaa is AIB
  MISC_FEATURE (39)..(39): C-terminal amidation

SEQ ID NO: 2566-3000 - skipped (435 entries)

SEQ ID NO: 3001 - protein, 29 aa, Homo sapiens
  MISC_FEATURE: Wild type glucagon
HSQGTFTSDYSKYLDSRRAQDFVQWLMNT

SEQ ID NO: 3002 - protein, 42 aa, Homo sapiens; identical to SEQ ID NO: 707
  mat_peptide (1)..(42): Gastric Inhibitory Polypeptide

SEQ ID NO: 3003 - protein, 30 aa, Artificial sequence; identical to SEQ ID NO: 52
  Synthetic polypeptide
  MISC_FEATURE (1)..(30): GLP-1(7-36) amidated
  MISC_FEATURE (30)..(30): C-terminal amidation

SEQ ID NO: 3004 - protein, 31 aa, Homo sapiens; identical to SEQ ID NO: 50
  MISC_FEATURE (1)..(31): GLP-1(7-37)

SEQ ID NO: 3005 - protein, 10 aa, Artificial Sequence
  Synthetic peptide
GPSSGAPPPS

SEQ ID NO: 3006 - protein, 11 aa, Artificial Sequence
  Synthetic peptide
GGPSSGAPPPS

SEQ ID NO: 3007 - protein, 8 aa, Artificial Sequence
  Synthetic peptide
KRNRNNIA

SEQ ID NO: 3008 - protein, 4 aa, Artificial Sequence
  Synthetic peptide
KRNR

SEQ ID NO: 3009 - protein, 11 aa, Artificial Sequence
  Synthetic peptide
GPSSGAPPPSK

SEQ ID NO: 3010 - protein, 40 aa, Artificial Sequence; identical to SEQ ID NO: 756
  Synthetic peptide
  MISC_FEATURE: mt-263
  MISC_FEATURE (2)..(2): Xaa is AIB
  MISC_FEATURE (20)..(20): Xaa is AIB
  MISC_FEATURE (40)..(40): C-terminal amidation

SEQ ID NO: 3011 - protein, 40 aa, Artificial Sequence
  Synthetic peptide
  MISC_FEATURE: mt-402
  misc_feature (2)..(2): Xaa can be any naturally occurring amino acid
  misc_feature (20)..(20): Xaa can be any naturally occurring amino acid
YXQGTFTSDYSIYLDKKAAXEFVNWLLAGGPSSGAPPPSK

SEQ ID NO: 3012 - protein, 29 aa, Artificial Sequence
  Synthetic peptide
  MISC_FEATURE: mt-403
  MISC_FEATURE (16)..(20): Lactam bridge between residues 16 and 20
HSQGTFISDYSKYLDEIHQKEFIAWLMNT

SEQ ID NO: 3013 - protein, 29 aa, Artificial Sequence
  Synthetic peptide
  MISC_FEATURE: mt-404
  MISC_FEATURE (16)..(20): Lactam bridge between residues 16 and 20
HSQGTFISDYSKALDEIHQKEFIAWLMNT

SEQ ID NO: 3014 - protein, 29 aa, Artificial Sequence
  Synthetic peptide
  MISC_FEATURE: mt-405
  MISC_FEATURE (16)..(20): Lactam bridge between residues 16 and 20
YSQGTFTSDYSKYLDEIHQKDFVNWLLAQ

SEQ ID NO: 3015 - protein, 39 aa, Artificial Sequence; identical to SEQ ID NO: 1033
  Synthetic peptide
  MISC_FEATURE: mt-395
  MISC_FEATURE (16)..(20): Lactam bridge between residues 16 and 20

SEQ ID NO: 3016 - protein, 39 aa, Artificial Sequence; identical to SEQ ID NO: 1034
  Synthetic peptide
  MISC_FEATURE: mt-396
  MISC_FEATURE (16)..(20): Lactam bridge between residues 16 and 20

SEQ ID NO: 3017 - protein, 29 aa, Artificial Sequence
  Synthetic peptide
  MISC_FEATURE: mt-397
  MISC_FEATURE (16)..(20): Lactam bridge between residues 16 and 20
YSQGTFTSDYSKYLDEIHQKEFVNWLLAQ

SEQ ID NO: 3018 - protein, 39 aa, Artificial Sequence; identical to SEQ ID NO: 1036
  Synthetic peptide
  MISC_FEATURE: mt-398
  MISC_FEATURE (16)..(20): Lactam bridge between residues 16 and 20

SEQ ID NO: 3019 - protein, 42 aa, Artificial Sequence; identical to SEQ ID NO: 1019
  Synthetic peptide
  MISC_FEATURE: mt-217

SEQ ID NO: 3020 - protein, 42 aa, Artificial Sequence; identical to SEQ ID NO: 1020
  Synthetic peptide
  MISC_FEATURE: mt-218
  MISC_FEATURE (2)..(2): Xaa is AIB

SEQ ID NO: 3021 - protein, 42 aa, Artificial Sequence; identical to SEQ ID NO: 1021
  Synthetic peptide
  MISC_FEATURE: mt-219

SEQ ID NO: 3022 - protein, 42 aa, Artificial Sequence; identical to SEQ ID NO: 1022
  Synthetic peptide
  MISC_FEATURE: mt-220
  MISC_FEATURE (2)..(2): Xaa is AIB

SEQ ID NO: 3023 - protein, 40 aa, Artificial Sequence; identical to SEQ ID NO: 1259
  Synthetic peptide
  MISC_FEATURE: mt-225
  MISC_FEATURE (2)..(2): Xaa is AIB
  MISC_FEATURE (16)..(20): Lactam bridge links Glu16 and Lys20
  MISC_FEATURE (40)..(40): Epsilon amine of Lys is attached to Ala-Ac-Cys(PEG), wherein the Ac-Cys(PEG) is a Cys residue comprising an alpha amino group capped with an acetyl group (CH3CO) and comprising a 40 kDa PEG covalently attached to its side chain

SEQ ID NO: 3024 - protein, 42 aa, Artificial Sequence; identical to SEQ ID NO: 1023
  Synthetic peptide
  MISC_FEATURE: mt-226

SEQ ID NO: 3025 - protein, 40 aa, Artificial Sequence; identical to SEQ ID NO: 1259
  Synthetic peptide
  MISC_FEATURE: mt-227
  MISC_FEATURE (2)..(2): Xaa is AIB
  MISC_FEATURE (16)..(20): Lactam bridge links Glu16 and Lys20
  MISC_FEATURE (40)..(40): Epsilon amine of Lys is attached to Arg-Ac-Cys(PEG), wherein the Ac-Cys(PEG) is a Cys residue comprising an alpha amino group capped with an acetyl group (CH3CO) and comprising a 40 kDa PEG covalently attached to its side chain

SEQ ID NO: 3026 - protein, 42 aa, Artificial Sequence; identical to SEQ ID NO: 1023
  Synthetic peptide
  MISC_FEATURE: mt-228
  MISC_FEATURE (24)..(24): PEG (40kDa) bound to Cysteine

SEQ ID NO: 3027 - protein, 39 aa, Artificial Sequence; identical to SEQ ID NO: 2100
  Sythetic peptide
  MISC_FEATURE: Analog #29
  MISC_FEATURE (2)..(2): d-Ser
  MISC_FEATURE (10)..(10): Acylated with a C16 fatty acyl group via gamma-Glu spacer
  MISC_FEATURE (39)..(39): C-terminal amidation

SEQ ID NO: 3028 - protein, 39 aa, Artificial Sequence; identical to SEQ ID NO: 2010
  Synthetic peptide
  MISC_FEATURE: Analog #30
  MISC_FEATURE (2)..(2): Xaa is AIB
  MISC_FEATURE (10)..(10): Acylated with a C16 fatty acyl group via gamma-Glu spacer
  MISC_FEATURE (39)..(39): C-terminal amidation

SEQ ID NO: 3029 - protein, 31 aa, Artificial Sequence; identical to SEQ ID NO: 2102
  Synthetic peptide
  MISC_FEATURE: Analog #34
  MISC_FEATURE (2)..(2): Xaa is AIB
  MISC_FEATURE (10)..(10): Acylated with a C16 fatty acyl group via gamma-Glu spacer
  MISC_FEATURE (31)..(31): C-terminal amidation

SEQ ID NO: 3030 - protein, 29 aa, Artificial Sequence
  Synthetic peptide
  MISC_FEATURE: Analog #36
  MISC_FEATURE (2)..(2): d-Ser
  MISC_FEATURE (10)..(10): Acylated with a C16 fatty acyl group via gamma-Glu spacer
  MISC_FEATURE (20)..(20): Xaa is AIB
  MISC_FEATURE (29)..(29): C-terminal amidation
HSQGTFTSDKSKYLDERRAXEFVQWLLDT

SEQ ID NO: 3031 - protein, 29 aa, Artificial Sequence
  Synthetic peptide
  MISC_FEATURE: Analog #37
  MISC_FEATURE (2)..(2): Xaa is AIB
  MISC_FEATURE (10)..(10): Acylated with a C16 fatty acyl group via gamma-Glu spacer
  MISC_FEATURE (20)..(20): Xaa is AIB
  MISC_FEATURE (29)..(29): C-terminal amidation
HXQGTFTSDKSKYLDERRAXEFVQWLLDT

SEQ ID NO: 3032 - protein, 29 aa, Artificial Sequence
  Sythetic peptide
  MISC_FEATURE: Analog #44
  MISC_FEATURE (1)..(1): Xaa is DMIA
  MISC_FEATURE (2)..(2): d-Ser
  MISC_FEATURE (10)..(10): Acylated with C16 fatty acyl group via gamma-Glu spacer
  MISC_FEATURE (29)..(29): C-terminal amidation
XSQGTFTSDKSKYLDERAAQDFVQWLLDT

SEQ ID NO: 3033 - protein, 39 aa, Artificial Sequence; identical to SEQ ID NO: 2106
  Synthetic peptide
  MISC_FEATURE: Analog #49
  MISC_FEATURE (2)..(2): Xaa is AIB
  MISC_FEATURE (10)..(10): Acylated with a C16 fatty acyl group via gamma-Glu-gamma-Glu spacer
  MISC_FEATURE (16)..(16): Xaa is AIB
  MISC_FEATURE (39)..(39): C-terminal amidation

SEQ ID NO: 3034 - skipped

SEQ ID NO: 3035 - protein, 39 aa, Artificial Sequence; identical to SEQ ID NO: 2107
  Synthetic peptide
  MISC_FEATURE: Analog #53
  MISC_FEATURE (2)..(2): Xaa is AIB
  MISC_FEATURE (10)..(10): Acylated with a C16 fatty acyl group via gamma-Glu-gamma-Glu spacer
  MISC_FEATURE (16)..(16): Xaa is AIB
  MISC_FEATURE (39)..(39): C-terminal amidation

SEQ ID NO: 3036 - protein, 39 aa, Artificial Sequence; identical to SEQ ID NO: 2108
  Synthetic peptide
  MISC_FEATURE: Analog #54
  misc_feature (2)..(2): Xaa can be any naturally occurring amino acid
  MISC_FEATURE (10)..(10): Acylated with C16 fatty acyl group via gamma-Glu-gamma-Glu spacer
  MISC_FEATURE (16)..(16): Xaa is AIB
  MISC_FEATURE (16)..(16): Xaa is AIB
  MISC_FEATURE (39)..(39): C-terminal amidation

SEQ ID NO: 3037 - protein, 39 aa, Artificial Sequence; identical to SEQ ID NO: 2109
  Sythetic peptide
  MISC_FEATURE: Analog #61
  MISC_FEATURE (2)..(2): Xaa is AIB
  MISC_FEATURE (10)..(10): Acylated with a C16 fatty acyl group via gamma-Glu spacer
  MISC_FEATURE (20)..(20): Xaa is AIB
  MISC_FEATURE (39)..(39): C-terminal amidation

SEQ ID NO: 3038 - protein, 39 aa, Artificial Sequence; identical to SEQ ID NO: 2110
  Synthetic peptide
  MISC_FEATURE: Analog #62
  MISC_FEATURE (2)..(2): Xaa is AIB
  MISC_FEATURE (10)..(10): Acylated with a C16 fatty acyl group via gamma-Glu spacer
  MISC_FEATURE (20)..(20): Xaa is AIB
  MISC_FEATURE (39)..(39): C-terminal amidation

SEQ ID NO: 3039 - protein, 39 aa, Artificial Sequence; identical to SEQ ID NO: 2012
  Synthetic peptide
  MISC_FEATURE: Analog #63
  MISC_FEATURE (2)..(2): Xaa is AIB
  MISC_FEATURE (10)..(10): Acylated with a C16 fatty acyl group via gamma-Glu spacer
  MISC_FEATURE (39)..(39): C-terminal amidation

SEQ ID NO: 3040 - protein, 29 aa, Artificial Sequence
  Synthetic peptide
  MISC_FEATURE: Analog #64
  MISC_FEATURE (2)..(2): Xaa is AIB
  MISC_FEATURE (10)..(10): Acylated with a C16 fatty acyl group via gamma-Glu spacer
  MISC_FEATURE (20)..(20): Xaa is AIB
  MISC_FEATURE (29)..(29): C-terminal amidation
HXEGTFTSDKSKYLDERRAXEFVQWLLDT

SEQ ID NO: 3041 - protein, 39 aa, Artificial Sequence; identical to SEQ ID NO: 2113
  Synthetic peptide
  MISC_FEATURE: Analog #65
  MISC_FEATURE (2)..(2): Xaa is AIB
  MISC_FEATURE (10)..(10): Acylated with a C16 fatty acyl group via gamma-Glu spacer
  MISC_FEATURE (20)..(20): Xaa is AIB
  MISC_FEATURE (39)..(39): C-terminal amidation

SEQ ID NO: 3042 - protein, 29 aa, Artificial Sequence
  Synthetic peptide
  MISC_FEATURE (2)..(2): Xaa is AIB
  MISC_FEATURE (16)..(16): Xaa is AIB
  MISC_FEATURE (29)..(29): C-terminal amidation
HXQGTFTSDYSKYLDXRRAQDFVQWLMNT

SEQ ID NO: 3043 - protein, 29 aa, Artificial Sequence
  Synthetic peptide
  MISC_FEATURE (2)..(2): Xaa is AIB
  MISC_FEATURE (9)..(9): Acylated with a C16 fatty acyl group via gamma-Glu-gamma-Glu spacer
  MISC_FEATURE (16)..(16): Xaa is AIB
  MISC_FEATURE (29)..(29): C-terminal amidation
HXQGTFTSKYSKYLDXRRAQDFVQWLMNT

SEQ ID NO: 3044 - protein, 29 aa, Artificial Sequence
  Synthetic peptide
  MISC_FEATURE (2)..(2): Xaa is AIB
  MISC_FEATURE (10)..(10): Acylated with a C16 fatty acyl group via gamma-Glu-gamma-Glu spacer
  MISC_FEATURE (16)..(16): Xaa is AIB
  MISC_FEATURE (29)..(29): C-terminal amidation
HXQGTFTSDKSKYLDXRRAQDFVQWLMNT

SEQ ID NO: 3045 - protein, 29 aa, Artificial Sequence
  Synthetic peptide
  MISC_FEATURE (2)..(2): Xaa is AIB
  MISC_FEATURE (12)..(12): Acylated with a C16 fatty acyl group via gamma-Glu-gamma-Glu spacer
  MISC_FEATURE (16)..(16): Xaa is AIB
  MISC_FEATURE (29)..(29): C-terminal amidation
HXQGTFTSDYSKYLDXRRAQDFVQWLMNT

SEQ ID NO: 3046 - protein, 29 aa, Artificial Sequence
  Sythetic peptide
  MISC_FEATURE (2)..(2): Xaa is AIB
  MISC_FEATURE (16)..(16): Acylated with a C16 fatty acyl group via gamma-Glu-gamma-Glu spacer
  MISC_FEATURE (29)..(29): C-terminal amidation
HXQGTFTSDYSKYLDKRRAQDFVQWLMNT

SEQ ID NO: 3047 - protein, 29 aa, Artificial Sequence
  Synthetic peptide
  MISC_FEATURE (2)..(2): Xaa is AIB
  MISC_FEATURE (16)..(16): Xaa is AIB
  MISC_FEATURE (20)..(20): Acylated with a C16 fatty acyl group via gamma-Glu-gamma-Glu spacer
  MISC_FEATURE (29)..(29): C-terminal amidation
HXQGTFTSDYSKYLDXRRAKDFVQWLMNT

SEQ ID NO: 3048 - protein, 40 aa, Artificial Sequence
  Synthetic peptide
  MISC_FEATURE (2)..(2): d-Ser
  MISC_FEATURE (20)..(20): Xaa is AIB
  MISC_FEATURE (40)..(40): C-terminal amidation
HSQGTFTSDYSIYLDKQAAXEFVNWLLAGGPSSGAPPPSC

SEQ ID NO: 3049 - skipped

SEQ ID NO: 3050 - protein, 40 aa, Artificial Sequence
  Synthetic peptide
  MISC_FEATURE (2)..(2): d-Ser
  MISC_FEATURE (20)..(20): Xaa is AIB
  MISC_FEATURE (40)..(40): C-terminal amidation
YSQGTFTSDYSIYLDKQAAXEFVNWLLAGGPSSGAPPPSC

SEQ ID NO: 3051 - protein, 40 aa, Artificial Sequence; identical to SEQ ID NO: 3050
  Synthetic peptide
  MISC_FEATURE (2)..(2): d-Ser
  MISC_FEATURE (20)..(20): Xaa is AIB
  MISC_FEATURE (40)..(40): Covalently bound to PEG
  MISC_FEATURE (40)..(40): C-terminal amidation

SEQ ID NO: 3052 - protein, 40 aa, Artificial Sequence
  Synthetic peptide
  MISC_FEATURE (2)..(2): Xaa is AIB
  MISC_FEATURE (20)..(20): Xaa is AIB
  MISC_FEATURE (40)..(40): C-terminal amidation
HXQGTFTSDYSIYLDKQAAXEFVNWLLAGGPSSGAPPPSC

SEQ ID NO: 3053 - protein, 40 aa, Artificial Sequence; identical to SEQ ID NO: 3052
  Synthetic peptide
  MISC_FEATURE (2)..(2): Xaa is AIB
  MISC_FEATURE (20)..(20): Xaa is AIB
  MISC_FEATURE (40)..(40): Covalently bound to PEG
  MISC_FEATURE (40)..(40): C-terminal amidation

SEQ ID NO: 3054 - protein, 40 aa, Artificial Sequence
  Synthetic peptide
  MISC_FEATURE (2)..(2): Xaa is AIB
  MISC_FEATURE (20)..(20): Xaa is AIB
  MISC_FEATURE (24)..(24): Xaa is AIB
  MISC_FEATURE (40)..(40): C-terminal amidation
YXQGTFTSDYSIYLDKQAAXEFVXWLLAGGPSSGAPPPSC

SEQ ID NO: 3055 - skipped

SEQ ID NO: 3056 - protein, 40 aa, Artificial Sequence
  Synthetic peptide
  MISC_FEATURE (2)..(2): Xaa is AIB
  MISC_FEATURE (16)..(20): Linked via lactam bridge
  MISC_FEATURE (24)..(24): Xaa is AIB
  MISC_FEATURE (40)..(40): C-terminal amidation
YXQGTFTSDYSIYLDEQAAKEFVXWLLAGGPSSGAPPPSC

SEQ ID NO: 3057 - skipped

SEQ ID NO: 3058 - protein, 40 aa, Artificial Sequence
  Synthetic peptide
  MISC_FEATURE (2)..(2): Xaa is AIB
  MISC_FEATURE (17)..(21): Linked via lactam bridge
  MISC_FEATURE (20)..(20): Xaa is AIB
  MISC_FEATURE (40)..(40): C-terminal amidation
YXQGTFTSDYSIYLDKEAAXKFVNWLLAGGPSSGAPPPSC

SEQ ID NO: 3059 - protein, 40 aa, Artificial Sequence; identical to SEQ ID NO: 3058
  Synthetic peptide
  MISC_FEATURE (2)..(2): Xaa is AIB
  MISC_FEATURE (17)..(21): Linked via lactam bridge
  MISC_FEATURE (21)..(21): Xaa is AIB
  MISC_FEATURE (40)..(40): Covalently bound to PEG
  MISC_FEATURE (40)..(40): C-terminal amidation

SEQ ID NO: 3060 - protein, 40 aa, Artificial Sequence; identical to SEQ ID NO: 1107
  Synthetic peptide
  MISC_FEATURE (2)..(2): Xaa is AIB
  MISC_FEATURE (20)..(20): Xaa is 1-aminocyclopropane-1-carboxylate
  MISC_FEATURE (40)..(40): C-terminal amidation

SEQ ID NO: 3061 - skipped

SEQ ID NO: 3062 - protein, 39 aa, Artificial Sequence; identical to SEQ ID NO: 2119
  Synthetic peptide
  MISC_FEATURE (2)..(2): Xaa is AIB
  MISC_FEATURE (10)..(10): Acylated with a C14 acyl group via gamma-Glu spacer
  MISC_FEATURE (20)..(20): Xaa is AIB
  MISC_FEATURE (40)..(40): C-terminal amidation

SEQ ID NO: 3063 - protein, 40 aa, Artificial Sequence; identical to SEQ ID NO: 2120
  Synthetic peptide
  MISC_FEATURE (2)..(2): Xaa is AIB
  MISC_FEATURE (10)..(10): Acylated with a C14 fatty acyl group via gamma-Glu spacer
  MISC_FEATURE (20)..(20): Xaa is AIB
  MISC_FEATURE (40)..(40): Covalently bound to PEG
  MISC_FEATURE (40)..(40): C-terminal amidation

SEQ ID NO: 3064 - protein, 41 aa, Artificial Sequence; identical to SEQ ID NO: 2121
  Synthetic peptide
  MISC_FEATURE (2)..(2): Xaa is AIB
  MISC_FEATURE (20)..(20): Xaa is AIB
  MISC_FEATURE (40)..(40): Acylated with a C14 fatty acyl group via gamma-Glu spacer
  MISC_FEATURE (41)..(41): C-terminal amidation

SEQ ID NO: 3065 - protein, 41 aa, Artificial Sequence; identical to SEQ ID NO: 2122
  Synthetic peptide
  MISC_FEATURE (2)..(2): Xaa is AIB
  MISC_FEATURE (20)..(20): Xaa is AIB
  MISC_FEATURE (40)..(40): Acylated with a C14 fatty acyl group via gamma-Glu spacer
  MISC_FEATURE (41)..(41): Covalently bound to a PEG
  MISC_FEATURE (41)..(41): C-terminal amidation

SEQ ID NO: 3066 - protein, 40 aa, Artificial Sequence; identical to SEQ ID NO: 760
  Synthetic peptide
  MISC_FEATURE (2)..(2): Xaa is AIB
  MISC_FEATURE (20)..(20): Xaa is AIB
  MISC_FEATURE (40)..(40): Covalently bound to PEG
  MISC_FEATURE (40)..(40): C-terminal amidation

SEQ ID NO: 3067 - skipped

SEQ ID NO: 3068 - protein, 40 aa, Artificial Sequence; identical to SEQ ID NO: 2120
  Synthetic peptide
  MISC_FEATURE (2)..(2): Xaa is AIB
  MISC_FEATURE (10)..(10): Acylated with a C14 fatty acyl group via gamma-Glu spacer
  MISC_FEATURE (20)..(20): Xaa is AIB
  MISC_FEATURE (40)..(40): Covalently bound to PEG
  MISC_FEATURE (40)..(40): C-terminal amidation

SEQ ID NO: 3069 - protein, 40 aa, Artificial Sequence; identical to SEQ ID NO: 2120
  Synthetic peptide
  MISC_FEATURE (2)..(2): Xaa is AIB
  MISC_FEATURE (10)..(10): Acylated with a C16 fatty acyl group via gamma-Glu spacer
  MISC_FEATURE (20)..(20): Xaa is AIB
  MISC_FEATURE (40)..(40): Covalently bound to PEG
  MISC_FEATURE (40)..(40): C-terminal amidation

SEQ ID NO: 3070 - protein, 40 aa, Artificial Sequence; identical to SEQ ID NO: 766
  Synthetic peptide
  MISC_FEATURE (2)..(2): Xaa is AIB
  MISC_FEATURE (20)..(20): Xaa is AIB
  MISC_FEATURE (24)..(24): Covalently bound to PEG
  MISC_FEATURE (40)..(40): Acylated with a C16 fatty acyl group
  MISC_FEATURE (40)..(40): C-terminal amidation

SEQ ID NO: 3071 - skipped

SEQ ID NO: 3072 - protein, 40 aa, Artificial Sequence
  Synthetic peptide
  MISC_FEATURE (2)..(2): Xaa is AIB
  MISC_FEATURE (20)..(20): Xaa is AIB
  MISC_FEATURE (40)..(40): Covalently bound to PEG
  MISC_FEATURE (40)..(40): C-terminal amidation
YXEGTFISDYSIYLDKQAAXEFVNWLLAGGPSSGAPPPSC

SEQ ID NO: 3073 - protein, 40 aa, Artificial Sequence; identical to SEQ ID NO: 760
  Synthetic peptid
  MISC_FEATURE (2)..(2): Xaa is AIB
  MISC_FEATURE (20)..(20): Xaa is 1-aminocyclopropane-1-carboxylate
  MISC_FEATURE (40)..(40): Covalently bound to PEG
  MISC_FEATURE (40)..(40): C-terminal amidation

SEQ ID NO: 3074 - protein, 40 aa, Artificial Sequence
  Synthetic peptide
  MISC_FEATURE (2)..(2): Xaa is AIB
  MISC_FEATURE (20)..(20): Xaa is 1-aminocyclopropane-1-carboxylate
  MISC_FEATURE (40)..(40): Covalently bound to PEG
  MISC_FEATURE (40)..(40): C-terminal amidation
HXQGTFISDYSIYLDKQAAXEFVNWLLAGGPSSGAPPPSC

SEQ ID NO: 3075 - protein, 40 aa, Artificial Sequence
  Synthetic peptide
  MISC_FEATURE (2)..(2): Xaa is AIB
  MISC_FEATURE (20)..(20): Xaa is 1-aminocyclopropane-1-carboxylate
  MISC_FEATURE (40)..(40): Covalently bound to PEG
  MISC_FEATURE (40)..(40): C-terminal amidation
YXQGTFISDYSIYLDKQAAXEFVNWLLAGGPSSGAPPPSC

SEQ ID NO: 3076 - protein, 31 aa, Artificial Sequence; identical to SEQ ID NO: 2126
  Synthetic peptide
  MISC_FEATURE (2)..(2): Xaa is AIB
  MISC_FEATURE (10)..(10): Acylated with a C16 fatty acyl group via gamma-Glu spacer
  MISC_FEATURE (20)..(20): Xaa is AIB
  MISC_FEATURE (31)..(31): C-terminal amidation

SEQ ID NO: 3077 - protein, 31 aa, Artificial Sequence; identical to SEQ ID NO: 2127
  Synthetic peptide
  MISC_FEATURE (2)..(2): d-Ser
  MISC_FEATURE (10)..(10): Acylated with a C16 fatty acyl group via gamma-Glu spacer
  MISC_FEATURE (20)..(20): Xaa is AIB
  MISC_FEATURE (31)..(31): C-terminal amiation

SEQ ID NO: 3078 - protein, 39 aa, Artificial Sequence; identical to SEQ ID NO: 2128
  Synthetic peptide
  MISC_FEATURE (2)..(2): d-Ser
  MISC_FEATURE (10)..(10): Acylated with a C16 fatty acyl group via gamma-Glu spacer
  MISC_FEATURE (20)..(20): Xaa is AIB
  MISC_FEATURE (39)..(39): C-terminal amidation

SEQ ID NO: 3079 - protein, 39 aa, Artificial Sequence; identical to SEQ ID NO: 2109
  Synthetic peptid
  MISC_FEATURE (2)..(2): Xaa is AIB
  MISC_FEATURE (10)..(10): Acylated with a C16 fatty acyl group via gamma-Glu spacer
  MISC_FEATURE (20)..(20): Xaa is AIB
  MISC_FEATURE (39)..(39): C-terminal amidation

SEQ ID NO: 3080 - protein, 39 aa, Artificial Sequence; identical to SEQ ID NO: 2012
  Synthetic peptide
  MISC_FEATURE (2)..(2): Xaa is AIB
  MISC_FEATURE (10)..(10): Acylated with C16 fatty acyl group via gamma-Glu spacer
  MISC_FEATURE (39)..(39): C-terminal amidation

SEQ ID NO: 3081 - protein, 39 aa, Artificial Sequence; identical to SEQ ID NO: 2119
  Synthetic peptide
  MISC_FEATURE (2)..(2): Xaa is AIB
  MISC_FEATURE (10)..(10): Acylated with C16 fatty acyl group via gamma-Glu-gamma-Glu spacer
  MISC_FEATURE (20)..(20): Xaa is AIB
  MISC_FEATURE (39)..(39): C-terminal amidation

SEQ ID NO: 3082 - protein, 39 aa, Artificial Sequence; identical to SEQ ID NO: 758
  Synthetic peptide
  MISC_FEATURE (2)..(2): Xaa is AIB
  MISC_FEATURE (10)..(10): Acylated with C16 fatty acyl group via gamma-Glu-gamma-Glu spacer
  MISC_FEATURE (20)..(20): Xaa is AIB
  MISC_FEATURE (39)..(39): C-terminal amidation

SEQ ID NO: 3083 - protein, 39 aa, Artificial Sequence; identical to SEQ ID NO: 2133
  Synthetic peptide
  MISC_FEATURE (2)..(2): Xaa is AIB
  MISC_FEATURE (10)..(10): Acylated with a C16 fatty acyl group via gamma-Glu spacer
  MISC_FEATURE (20)..(20): Xaa is AIB
  MISC_FEATURE (39)..(39): C-terminal amidation

SEQ ID NO: 3084 - protein, 39 aa, Artificial Sequence; identical to SEQ ID NO: 2113
  Synthetic peptide
  MISC_FEATURE (2)..(2): Xaa is AIB
  MISC_FEATURE (10)..(10): Acylated with C16 fatty acyl group via gamma-Glu spacer
  MISC_FEATURE (20)..(20): Xaa is AIB
  MISC_FEATURE (39)..(39): C-terminal amidation

SEQ ID NO: 3085 - protein, 29 aa, Artificial Sequence
  Synthetic peptid
  MISC_FEATURE (2)..(2): Xaa is AIB
  MISC_FEATURE (10)..(10): Acylated with a C16 fatty acyl group via gamma-Glu spacer
  MISC_FEATURE (20)..(20): Xaa is AIB
  MISC_FEATURE (29)..(29): C-terminal amidation
HXEGTFTSDKSKYLDERRAXEFVQWLLDT

SEQ ID NO: 3086 - protein, 40 aa, Artificial Sequence; identical to SEQ ID NO: 2136
  Synthetic peptide
  MISC_FEATURE (2)..(2): Xaa is AIB
  MISC_FEATURE (40)..(40): Acylated with a C16 fatty acyl group
  MISC_FEATURE (40)..(40): C-terminal amidation

SEQ ID NO: 3087 - protein, 40 aa, Artificial Sequence; identical to SEQ ID NO: 2137
  Synthetic peptide
  MISC_FEATURE (2)..(2): Xaa is AIB
  MISC_FEATURE (20)..(20): Xaa is AIB
  MISC_FEATURE (40)..(40): Acylated with C16 fatty acyl group
  MISC_FEATURE (40)..(40): C-terminal amidation

SEQ ID NO: 3088 - protein, 41 aa, Artificial Sequence; identical to SEQ ID NO: 2011
  Synthetic peptide
  MISC_FEATURE (2)..(2): Xaa is AIB
  MISC_FEATURE (40)..(40): Acylated with a C16 fatty acyl group via gamma-Glu-gamma-Glu spacer
  MISC_FEATURE (41)..(41): C-terminal amidation

SEQ ID NO: 3089 - protein, 39 aa, Artificial Sequence; identical to SEQ ID NO: 2010
  Synthetic peptide
  MISC_FEATURE (2)..(2): Xaa is AIB
  MISC_FEATURE (10)..(10): Acylated with a C16 fatty acyl group via gamma-Glu-gamma-Glu spacer
  MISC_FEATURE (39)..(39): C-terminal amidation

SEQ ID NO: 3090 - protein, 39 aa, Artificial Sequence; identical to SEQ ID NO: 2141
  Synthetic peptide
  MISC_FEATURE (2)..(2): Xaa is AIB
  MISC_FEATURE (10)..(10): Acylated with a C16 fatty acyl group via gamma-Glu-gamma-Glu spacer
  MISC_FEATURE (20)..(20): Xaa is AIB
  MISC_FEATURE (39)..(39): C-terminal amidation

SEQ ID NO: 3091 - protein, 29 aa, Artificial Sequence
  Synthetic peptide
  MISC_FEATURE (2)..(2): Xaa is AIB
  MISC_FEATURE (10)..(10): Acylated with a C16 fatty acyl group via gamma-Glu-gamma-Glu spacer
  MISC_FEATURE (20)..(20): Xaa is AIB
  MISC_FEATURE (29)..(29): C-terminal amidation
YXQGTFTSDKSIYLDKQAAXEFVNWLLDT

SEQ ID NO: 3092 - skipped

SEQ ID NO: 3093 - protein, 39 aa, Artificial Sequence; identical to SEQ ID NO: 2100
  Sythetic peptide
  MISC_FEATURE: Analog #29
  MISC_FEATURE (2)..(2): d-Ser
  MISC_FEATURE (10)..(10): Acylated with a C16 fatty acyl group via acid amino acid spacer
  MISC_FEATURE (39)..(39): C-terminal amidation

SEQ ID NO: 3094 - protein, 39 aa, Artificial Sequence; identical to SEQ ID NO: 2010
  Synthetic peptide
  MISC_FEATURE: Analog #30
  MISC_FEATURE (2)..(2): Xaa is AIB
  MISC_FEATURE (10)..(10): Acylated with a C16 fatty acyl group via acidic amino acid spacer
  MISC_FEATURE (39)..(39): C-terminal amidation

SEQ ID NO: 3095 - protein, 31 aa, Artificial Sequence; identical to SEQ ID NO: 2102
  Synthetic peptide
  MISC_FEATURE: Analog #34
  MISC_FEATURE (2)..(2): Xaa is AIB
  MISC_FEATURE (10)..(10): Acylated with a C16 fatty acyl group via acidic amino acid spacer
  MISC_FEATURE (31)..(31): C-terminal amidation

SEQ ID NO: 3096 - protein, 29 aa, Artificial Sequence
  Synthetic peptide
  MISC_FEATURE: Analog #36
  MISC_FEATURE (2)..(2): d-Ser
  MISC_FEATURE (10)..(10): Acylated with a C16 fatty acyl group via acidic amino acid spacer
  MISC_FEATURE (20)..(20): Xaa is AIB
  MISC_FEATURE (29)..(29): C-terminal amidation
HSQGTFTSDKSKYLDERRAXEFVQWLLDT

SEQ ID NO: 3097 - protein, 29 aa, Artificial Sequence
  Synthetic peptide
  MISC_FEATURE: Analog #37
  MISC_FEATURE (2)..(2): Xaa is AIB
  MISC_FEATURE (10)..(10): Acylated with a C16 fatty acyl group via acidic amino acid spacer
  MISC_FEATURE (20)..(20): Xaa is AIB
  MISC_FEATURE (29)..(29): C-terminal amidation
HXQGTFTSDKSKYLDERRAXEFVQWLLDT

SEQ ID NO: 3098 - protein, 29 aa, Artificial Sequence
  Sythetic peptide
  MISC_FEATURE: Analog #44
  MISC_FEATURE (1)..(1): Xaa is DMIA
  MISC_FEATURE (2)..(2): d-Ser
  MISC_FEATURE (10)..(10): Acylated with C16 fatty acyl group via acidic amino acid spacer
  MISC_FEATURE (29)..(29): C-terminal amidation
XSQGTFTSDKSKYLDERAAQDFVQWLLDT

SEQ ID NO: 3099 - protein, 39 aa, Artificial Sequence; identical to SEQ ID NO: 2106
  Synthetic peptide
  MISC_FEATURE: Analog #49
  MISC_FEATURE (2)..(2): Xaa is AIB
  MISC_FEATURE (10)..(10): Acylated with a C16 fatty acyl group via dipeptide spacer
  MISC_FEATURE (16)..(16): Xaa is AIB
  MISC_FEATURE (39)..(39): C-terminal amidation

SEQ ID NO: 3100 - skipped

SEQ ID NO: 3101 - protein, 39 aa, Artificial Sequence; identical to SEQ ID NO: 2107
  Synthetic peptide
  MISC_FEATURE: Analog #53
  MISC_FEATURE (2)..(2): Xaa is AIB
  MISC_FEATURE (10)..(10): Acylated with a C16 fatty acyl group via dipeptide spacer
  MISC_FEATURE (16)..(16): Xaa is AIB
  MISC_FEATURE (39)..(39): C-terminal amidation

SEQ ID NO: 3102 - protein, 39 aa, Artificial Sequence; identical to SEQ ID NO: 2108
  Synthetic peptide
  MISC_FEATURE: Analog #54
  MISC_FEATURE (2)..(2): Xaa is AIB
  MISC_FEATURE (10)..(10): Acylated with C16 fatty acyl group via acidic amino acid spacer
  MISC_FEATURE (16)..(16): Xaa is AIB
  MISC_FEATURE (39)..(39): C-terminal amidation

SEQ ID NO: 3103 - protein, 39 aa, Artificial Sequence; identical to SEQ ID NO: 2109
  Sythetic peptide
  MISC_FEATURE: Analog #61
  MISC_FEATURE (2)..(2): Xaa is AIB
  MISC_FEATURE (10)..(10): Acylated with a C16 fatty acyl group via acidic amino acid spacer
  MISC_FEATURE (20)..(20): Xaa is AIB
  MISC_FEATURE (39)..(39): C-terminal amidation

SEQ ID NO: 3104 - protein, 39 aa, Artificial Sequence; identical to SEQ ID NO: 2110
  Synthetic peptide
  MISC_FEATURE: Analog #62
  MISC_FEATURE (2)..(2): Xaa is AIB
  MISC_FEATURE (10)..(10): Acylated with a C16 fatty acyl group via acidic amino acid spacer
  MISC_FEATURE (20)..(20): Xaa is AIB
  MISC_FEATURE (39)..(39): C-terminal amidation

SEQ ID NO: 3105 - protein, 39 aa, Artificial Sequence; identical to SEQ ID NO: 2012
  Synthetic peptide
  MISC_FEATURE: Analog #63
  MISC_FEATURE (2)..(2): Xaa is AIB
  MISC_FEATURE (10)..(10): Acylated with a C16 fatty acyl group via acidic amino acid spacer
  MISC_FEATURE (39)..(39): C-terminal amidation

SEQ ID NO: 3106 - protein, 29 aa, Artificial Sequence
  Synthetic peptide
  MISC_FEATURE: Analog #64
  MISC_FEATURE (2)..(2): Xaa is AIB
  MISC_FEATURE (10)..(10): Acylated with a C16 fatty acyl group via acidic amino acid spacer
  MISC_FEATURE (20)..(20): Xaa is AIB
  MISC_FEATURE (29)..(29): C-terminal amidation
HXEGTFTSDKSKYLDERRAXEFVQWLLDT

SEQ ID NO: 3107 - protein, 39 aa, Artificial Sequence; identical to SEQ ID NO: 2113
  Synthetic peptide
  MISC_FEATURE: Analog #65
  MISC_FEATURE (2)..(2): Xaa is AIB
  MISC_FEATURE (10)..(10): Acylated with a C16 fatty acyl group via acidic amino acid spacer
  MISC_FEATURE (20)..(20): Xaa is AIB
  MISC_FEATURE (39)..(39): C-terminal amidation

SEQ ID NO: 3108 - protein, 29 aa, Artificial Sequence
  Synthetic peptide
  MISC_FEATURE (2)..(2): Xaa is AIB
  MISC_FEATURE (9)..(9): Acylated with a C16 fatty acyl group via dipeptide spacer
  MISC_FEATURE (16)..(16): Xaa is AIB
  MISC_FEATURE (29)..(29): C-terminal amidation
HXQGTFTSKYSKYLDXRRAQDFVQWLMNT

SEQ ID NO: 3109 - protein, 29 aa, Artificial Sequence
  Synthetic peptide
  MISC_FEATURE (2)..(2): Xaa is AIB
  MISC_FEATURE (10)..(10): Acylated with a C16 fatty acyl group via dipeptide spacer
  MISC_FEATURE (16)..(16): Xaa is AIB
  MISC_FEATURE (29)..(29): C-terminal amidation
HXQGTFTSDKSKYLDXRRAQDFVQWLMNT

SEQ ID NO: 3110 - protein, 29 aa, Artificial Sequence
  Synthetic peptide
  MISC_FEATURE (2)..(2): Xaa is AIB
  MISC_FEATURE (12)..(12): Acylated with a C16 fatty acyl group via dipeptide spacer
  MISC_FEATURE (16)..(16): Xaa is AIB
  MISC_FEATURE (29)..(29): C-terminal amidation
HXQGTFTSDYSKYLDXRRAQDFVQWLMNT

SEQ ID NO: 3111 - protein, 29 aa, Artificial Sequence
  Sythetic peptide
  MISC_FEATURE (2)..(2): Xaa is AIB
  MISC_FEATURE (16)..(16): Acylated with a C16 fatty acyl group via dipeptide spacer
  MISC_FEATURE (29)..(29): C-terminal amidation
HXQGTFTSDYSKYLDKRRAQDFVQWLMNT

SEQ ID NO: 3112 - protein, 29 aa, Artificial Sequence
  Synthetic peptide
  MISC_FEATURE (2)..(2): Xaa is AIB
  MISC_FEATURE (16)..(16): Xaa is AIB
  MISC_FEATURE (20)..(20): Acylated with a C16 fatty acyl group via dipeptide spacer
  MISC_FEATURE (29)..(29): C-terminal amidation
HXQGTFTSDYSKYLDXRRAKDFVQWLMNT

SEQ ID NO: 3113 - protein, 39 aa, Artificial Sequence; identical to SEQ ID NO: 2119
  Synthetic peptide
  MISC_FEATURE (2)..(2): Xaa is AIB
  MISC_FEATURE (10)..(10): Acylated with a C14 acyl group via acidic amino acid spacer
  MISC_FEATURE (20)..(20): Xaa is AIB
  MISC_FEATURE (40)..(40): C-terminal amidation

SEQ ID NO: 3114 - protein, 39 aa, Artificial Sequence; identical to SEQ ID NO: 2119
  Synthetic peptide
  MISC_FEATURE (2)..(2): Xaa is AIB
  MISC_FEATURE (10)..(10): Acylated with a C14 fatty acyl group via acidic amino acid spacer
  MISC_FEATURE (20)..(20): Xaa is AIB
  MISC_FEATURE (40)..(40): Covalently bound to PEG
  MISC_FEATURE (40)..(40): C-terminal amidation

SEQ ID NO: 3115 - protein, 41 aa, Artificial Sequence; identical to SEQ ID NO: 2121
  Synthetic peptide
  MISC_FEATURE (2)..(2): Xaa is AIB
  MISC_FEATURE (20)..(20): Xaa is AIB
  MISC_FEATURE (40)..(40): Acylated with a C14 fatty acyl group via acidic amino acid spacer
  MISC_FEATURE (41)..(41): C-terminal amidation

SEQ ID NO: 3116 - protein, 41 aa, Artificial Sequence; identical to SEQ ID NO: 2122
  Synthetic peptide
  MISC_FEATURE (2)..(2): Xaa is AIB
  MISC_FEATURE (20)..(20): Xaa is AIB
  MISC_FEATURE (40)..(40): Acylated with a C14 fatty acyl group via acidic amino acid spacer
  MISC_FEATURE (41)..(41): Covalently bound to PEG
  MISC_FEATURE (41)..(41): C-terminal amidation

SEQ ID NO: 3117 - protein, 40 aa, Artificial Sequence; identical to SEQ ID NO: 2120
  Synthetic peptide
  MISC_FEATURE (2)..(2): Xaa is AIB
  MISC_FEATURE (10)..(10): Acylated with a C14 fatty acyl group via acidic amino acid spacer
  MISC_FEATURE (20)..(20): Xaa is AIB
  MISC_FEATURE (40)..(40): Covalently bound to PEG
  MISC_FEATURE (40)..(40): C-terminal amidation

SEQ ID NO: 3118 - protein, 40 aa, Artificial Sequence; identical to SEQ ID NO: 2120
  Synthetic peptide
  MISC_FEATURE (2)..(2): Xaa is AIB
  MISC_FEATURE (10)..(10): Acylated with a C16 fatty acyl group via acidic amino acid spacer
  MISC_FEATURE (20)..(20): Xaa is AIB
  MISC_FEATURE (40)..(40): Covalently bound to PEG
  MISC_FEATURE (40)..(40): C-terminal amidation

SEQ ID NO: 3119 - protein, 31 aa, Artificial Sequence; identical to SEQ ID NO: 2126
  Synthetic peptide
  MISC_FEATURE (2)..(2): Xaa is AIB
  MISC_FEATURE (10)..(10): Acylated with a C16 fatty acyl group via acidic amino acid spacer
  MISC_FEATURE (20)..(20): Xaa is AIB
  MISC_FEATURE (31)..(31): C-terminal amidation

SEQ ID NO: 3120 - protein, 31 aa, Artificial Sequence; identical to SEQ ID NO: 2127
  Synthetic peptide
  MISC_FEATURE (2)..(2): d-Ser
  MISC_FEATURE (10)..(10): Acylated with a C16 fatty acyl group via acidic amino acid spacer
  MISC_FEATURE (20)..(20): Xaa is AIB
  MISC_FEATURE (31)..(31): C-terminal amiation

SEQ ID NO: 3121 - protein, 39 aa, Artificial Sequence; identical to SEQ ID NO: 2128
  Synthetic peptide
  MISC_FEATURE (2)..(2): d-Ser
  MISC_FEATURE (10)..(10): Acylated with a C16 fatty acyl group via acidic amino acid spacer
  MISC_FEATURE (20)..(20): Xaa is AIB
  MISC_FEATURE (39)..(39): C-terminal amidation

SEQ ID NO: 3122 - protein, 39 aa, Artificial Sequence; identical to SEQ ID NO: 2109
  Synthetic peptide
  MISC_FEATURE (2)..(2): Xaa is AIB
  MISC_FEATURE (10)..(10): Acylated with a C16 fatty acyl group via acidic amino acid spacer
  MISC_FEATURE (20)..(20): Xaa is AIB
  MISC_FEATURE (39)..(39): C-terminal amidation

SEQ ID NO: 3123 - protein, 39 aa, Artificial Sequence; identical to SEQ ID NO: 2012
  Synthetic peptide
  MISC_FEATURE (2)..(2): Xaa is AIB
  MISC_FEATURE (10)..(10): Acylated with C16 fatty acyl group via acidic amino acid spacer
  MISC_FEATURE (39)..(39): C-terminal amidation

SEQ ID NO: 3124 - protein, 39 aa, Artificial Sequence; identical to SEQ ID NO: 2119
  Synthetic peptide
  MISC_FEATURE (2)..(2): Xaa is AIB
  MISC_FEATURE (10)..(10): Acylated with C16 fatty acyl group via dipeptide spacer
  MISC_FEATURE (20)..(20): Xaa is AIB
  MISC_FEATURE (39)..(39): C-terminal amidation

SEQ ID NO: 3125 - protein, 39 aa, Artificial Sequence; identical to SEQ ID NO: 758
  Synthetic peptide
  MISC_FEATURE (2)..(2): Xaa is AIB
  MISC_FEATURE (10)..(10): Acylated with C16 fatty acyl group via dipeptide spacer
  MISC_FEATURE (20)..(20): Xaa is AIB
  MISC_FEATURE (39)..(39): C-terminal amidation

SEQ ID NO: 3126 - protein, 39 aa, Artificial Sequence; identical to SEQ ID NO: 2133
  Synthetic peptide
  MISC_FEATURE (2)..(2): Xaa is AIB
  MISC_FEATURE (10)..(10): Acylated with a C16 fatty acyl group via acidic amino acid spacer
  MISC_FEATURE (20)..(20): Xaa is AIB
  MISC_FEATURE (39)..(39): C-terminal amidation

SEQ ID NO: 3127 - protein, 39 aa, Artificial Sequence; identical to SEQ ID NO: 2113
  Synthetic peptide
  MISC_FEATURE (2)..(2): Xaa is AIB
  MISC_FEATURE (10)..(10): Acylated with C16 fatty acyl group via acidic amino acid spacer
  MISC_FEATURE (20)..(20): Xaa is AIB
  MISC_FEATURE (39)..(39): C-terminal amidation

SEQ ID NO: 3128 - protein, 29 aa, Artificial Sequence
  Synthetic peptid
  MISC_FEATURE (2)..(2): Xaa is AIB
  MISC_FEATURE (10)..(10): Acylated with a C16 fatty acyl group via acidic amino acid spacer
  MISC_FEATURE (20)..(20): Xaa is AIB
  MISC_FEATURE (29)..(29): C-terminal amidation
HXEGTFTSDKSKYLDERRAXEFVQWLLDT

SEQ ID NO: 3129 - protein, 41 aa, Artificial Sequence; identical to SEQ ID NO: 2011
  Synthetic peptide
  MISC_FEATURE (2)..(2): Xaa is AIB
  MISC_FEATURE (40)..(40): Acylated with a C16 fatty acyl group via dipeptide spacer
  MISC_FEATURE (41)..(41): C-terminal amidation

SEQ ID NO: 3130 - protein, 39 aa, Artificial Sequence; identical to SEQ ID NO: 2010
  Synthetic peptide
  MISC_FEATURE (2)..(2): Xaa is AIB
  MISC_FEATURE (10)..(10): Acylated with a C16 fatty acyl group via dipeptide spacer
  MISC_FEATURE (39)..(39): C-terminal amidation

SEQ ID NO: 3131 - protein, 39 aa, Artificial Sequence; identical to SEQ ID NO: 2141
  Synthetic peptide
  MISC_FEATURE (2)..(2): Xaa is AIB
  MISC_FEATURE (10)..(10): Acylated with a C16 fatty acyl group via dipeptide spacer
  MISC_FEATURE (20)..(20): Xaa is AIB
  MISC_FEATURE (39)..(39): C-terminal amidation

SEQ ID NO: 3132 - protein, 29 aa, Artificial Sequence
  Synthetic peptide
  MISC_FEATURE (2)..(2): Xaa is AIB
  MISC_FEATURE (10)..(10): Acylated with a C16 fatty acyl group via dipeptide spacer
  MISC_FEATURE (20)..(20): C-terminal amidation
  MISC_FEATURE (29)..(29): C-terminal amidation
YXQGTFTSDKSIYLDKQAAXEFVNWLLDT

SEQ ID NO: 3133 - protein, 40 aa, Artificial Sequence; identical to SEQ ID NO: 756
  Synthetic polypeptide
  MISC_FEATURE: mt-261
  MOD_RES (2)..(2): Xaa is Aib
  MOD_RES (20)..(20): Xaa is Aib
  MISC_FEATURE (40)..(40): 16 Carbon fatty acyl group covalently attached Lysine
  MISC_FEATURE (40)..(40): C-terminal amidation

SEQ ID NO: 3134 - protein, 40 aa, Artificial Sequence; identical to SEQ ID NO: 1123
  Synthetic polypeptide
  MISC_FEATURE: mt-278
  MOD_RES (2)..(2): Xaa is Aib
  MOD_RES (20)..(20): Xaa is Aib
  MISC_FEATURE (40)..(40): 16 Carbon fatty acyl group covalently attached to Lysine
  MISC_FEATURE (40)..(40): C-terminal amidation

SEQ ID NO: 3135 - protein, 39 aa, Artificial Sequence; identical to SEQ ID NO: 2119
  Synthetic peptide
  MISC_FEATURE: mt-384
  MISC_FEATURE (2)..(2): Xaa is AIB
  MISC_FEATURE (10)..(10): Acylated with a C16 fatty acyl group via gamma-Glu-gamma-Glu spacer
  MISC_FEATURE (20)..(20): Xaa is AIB
  MISC_FEATURE (39)..(39): C-terminal amidation

SEQ ID NO: 3136 - protein, 39 aa, Artificial Sequence; identical to SEQ ID NO: 2119
  Synthetic peptide
  MISC_FEATURE: mt-384
  MISC_FEATURE (2)..(2): Xaa is AIB
  MISC_FEATURE (10)..(10): Acylated with a C16 fatty acyl group via dipeptide spacer
  MISC_FEATURE (20)..(20): Xaa is AIB
  MISC_FEATURE (39)..(39): C-terminal amidation

SEQ ID NO: 3137 - protein, 40 aa, Artificial Sequence; identical to SEQ ID NO: 756
  Synthetic peptide
  MISC_FEATURE (2)..(2): Xaa is AIB
  MISC_FEATURE (20)..(20): Xaa is AIB
  MISC_FEATURE (40)..(40): Covalently bound to a C16 fatty acyl group
  MISC_FEATURE (40)..(40): C-terminal amidation

SEQ ID NO: 3138 - protein, 41 aa, Artificial Sequence; identical to SEQ ID NO: 2187
  Synthetic peptide
  MISC_FEATURE (2)..(2): Xaa is AIB
  MISC_FEATURE (20)..(20): Xaa is AIB
  MISC_FEATURE (40)..(40): Covalently bound to a C16 fatty acyl group
  MISC_FEATURE (41)..(41): C-terminal amidation

SEQ ID NO: 3139 - protein, 41 aa, Artificial Sequence; identical to SEQ ID NO: 2187
  Synthetic peptide
  MISC_FEATURE (2)..(2): Xaa is AIB
  MISC_FEATURE (20)..(20): Xaa is AIB
  MISC_FEATURE (40)..(40): Covantly bound to a C16 succinoyl
  MISC_FEATURE (41)..(41): C-terminal amidation

SEQ ID NO: 3140 - protein, 41 aa, Artificial Sequence; identical to SEQ ID NO: 2187
  Synthetic peptide
  MISC_FEATURE (2)..(2): Xaa is AIB
  MISC_FEATURE (20)..(20): Xaa is AIB
  MISC_FEATURE (40)..(40): Covalently bound to a C16 succinoyl via a beta-Ala spacer
  MISC_FEATURE (41)..(41): C-terminal amidation

SEQ ID NO: 3141 - protein, 41 aa, Artificial Sequence; identical to SEQ ID NO: 2187
  Synthetic peptide
  MISC_FEATURE (2)..(2): Xaa is AIB
  MISC_FEATURE (20)..(20): Xaa is AIB
  MISC_FEATURE (40)..(40): Covalently bound to a C18 succinoyl
  MISC_FEATURE (41)..(41): C-terminal amidation

SEQ ID NO: 3142 - protein, 39 aa, Artificial Sequence; identical to SEQ ID NO: 1198
  Synthetic peptide
  MISC_FEATURE (2)..(2): Xaa is AIB
  MISC_FEATURE (10)..(10): Xaa is 4-amino-Phe
  MISC_FEATURE (10)..(10): 4-amino-Phe covalently bound a C16 fatty acyl group via gamma-Glu-gamma-Glu spacer
  MISC_FEATURE (20)..(20): Xaa is AIB
  MISC_FEATURE (39)..(39): C-terminal amidation

SEQ ID NO: 3143 - protein, 39 aa, Artificial Sequence; identical to SEQ ID NO: 1198
  Synthetic peptide
  MISC_FEATURE (2)..(2): Xaa is AIB
  MISC_FEATURE (10)..(10): Xaa is 4-amino-Phe
  MISC_FEATURE (10)..(10): 4-amino-Phe is covalently bound to a C16 succinoyl
  MISC_FEATURE (20)..(20): Xaa is AIB
  MISC_FEATURE (39)..(39): C-terminal amidation

SEQ ID NO: 3144 - protein, 41 aa, Artificial Sequence; identical to SEQ ID NO: 2193
  Synthetic peptide
  MISC_FEATURE (2)..(2): Xaa is AIB
  MISC_FEATURE (40)..(40): Xaa is 4-amino-Phe
  MISC_FEATURE (40)..(40): 4-amino-Phe covalently bound to a C16 fatty acyl group via gamma-Glu-gamma-Glu spacer
  MISC_FEATURE (41)..(41): C-terminal amidation

SEQ ID NO: 3145 - protein, 41 aa, Artificial Sequence; identical to SEQ ID NO: 2193
  Synthetic peptide
  MOD_RES (2)..(2): Xaa is AIB
  MOD_RES (40)..(40): Xaa is 4-amino Phe
  MOD_RES (40)..(40): 4-amino Phe covalently bound to C16 succinoyl
  MOD_RES (41)..(41): C-terminal amidation

SEQ ID NO: 3146 - protein, 39 aa, Artificial Sequence; identical to SEQ ID NO: 2195
  Synthetic peptide
  MISC_FEATURE (2)..(2): Xaa is AIB
  MISC_FEATURE (6)..(6): Xaa is 4-amino-Phe
  MISC_FEATURE (6)..(6): 4-amino-Phe covalently bound to C16 fatty acyl group via gamma-Glu spacer
  MISC_FEATURE (39)..(39): C-terminal amidation

SEQ ID NO: 3147 - protein, 39 aa, Artificial Sequence; identical to SEQ ID NO: 2196
  Synthetic peptide
  MISC_FEATURE (2)..(2): Xaa is AIB
  MISC_FEATURE (10)..(10): Xaa is 4-amino-Phe
  MISC_FEATURE (10)..(10): 4-amino-Phe covalently bound to C16 fatty acyl group via gamma-Glu spacer
  MISC_FEATURE (39)..(39): C-terminal amidation

SEQ ID NO: 3148 - protein, 39 aa, Artificial Sequence; identical to SEQ ID NO: 2197
  Synthetic peptide
  MISC_FEATURE (2)..(2): Xaa is AIB
  MISC_FEATURE (13)..(13): Xaa is 4-amino-Phe
  MISC_FEATURE (13)..(13): 4-amino-Phe covalently bound to C16 fatty acyl group via gamma-Glu spacer
  MISC_FEATURE (39)..(39): C-terminal amidation

SEQ ID NO: 3149 - protein, 39 aa, Artificial Sequence; identical to SEQ ID NO: 2196
  Synthetic peptide
  MISC_FEATURE (2)..(2): Xaa is AIB
  MISC_FEATURE (10)..(10): Xaa is 4-amino-Phe
  MISC_FEATURE (10)..(10): 4-amino-Phe covalently bound to C16 succinoyl
  MISC_FEATURE (39)..(39): C-terminal amidation

SEQ ID NO: 3150 - protein, 39 aa, Artificial Sequence; identical to SEQ ID NO: 2199
  Synthetic peptide
  MOD_RES (2)..(2): Xaa is AIB
  MOD_RES (13)..(13): Covalently bound to a C16 fatty acyl group via gamma-Glu spacer
  MOD_RES (39)..(39): C-terminal amidation

SEQ ID NO: 3151 - protein, 39 aa, Artificial Sequence; identical to SEQ ID NO: 2200
  Synthetic peptide
  MISC_FEATURE (2)..(2): Xaa is AIB
  MISC_FEATURE (14)..(14): Covalently bound to a C16 fatty acyl group via gamma-Glu spacer
  MISC_FEATURE (39)..(39): C-terminal amidation

SEQ ID NO: 3152 - protein, 39 aa, Artificial Sequence; identical to SEQ ID NO: 2201
  Synthetic peptide
  MISC_FEATURE (2)..(2): Xaa is AIB
  MISC_FEATURE (16)..(16): Covalently bound to C16 fatty acyl group via gamma-Glu spacer
  MISC_FEATURE (39)..(39): C-terminal amidation

SEQ ID NO: 3153 - protein, 39 aa, Artificial Sequence; identical to SEQ ID NO: 2202
  Synthetic peptide
  MISC_FEATURE (2)..(2): Xaa is AIB
  MISC_FEATURE (17)..(17): Covalently bound to C16 fatty acyl group via gamma-Glu spacer
  MISC_FEATURE (39)..(39): C-terminal amidation

SEQ ID NO: 3154 - protein, 41 aa, Artificial Sequence; identical to SEQ ID NO: 2011
  Synthetic peptide
  MISC_FEATURE (2)..(2): Xaa is AIB
  MISC_FEATURE (40)..(40): Covalently bound to a C16 fatty acyl group via gamma-Glu spacer
  MISC_FEATURE (41)..(41): C-terminal amidation

SEQ ID NO: 3155 - protein, 41 aa, Artificial Sequence; identical to SEQ ID NO: 2011
  Synthetic peptide
  MISC_FEATURE (2)..(2): Xaa is AIB
  MISC_FEATURE (40)..(40): Covalently bound to C16 succinoyl
  MISC_FEATURE (41)..(41): C-terminal amidation

SEQ ID NO: 3156 - protein, 41 aa, Artificial Sequence; identical to SEQ ID NO: 2011
  Synthetic peptide
  MISC_FEATURE (2)..(2): Xaa is AIB
  MISC_FEATURE (40)..(40): Covalently bound to C16 fatty acyl group via a spacer comprising an amido miniPEG acid and a gamma-Glu, wherein the amido miniPEG acid has a structure {-N- CH2- CH2-[-O-CH2-CH2-]n-COO-}, wherein n is 2
  MISC_FEATURE (41)..(41): C-terminal amidation

SEQ ID NO: 3157 - protein, 41 aa, Artificial Sequence; identical to SEQ ID NO: 2011
  Synthetic peptide
  MISC_FEATURE (2)..(2): Xaa is AIB
  MISC_FEATURE (40)..(40): Covalently bound to a C16 fatty acyl group via spacer comprising an amido miniPEG acid and a gamma-Glu, wherein the amido miniPEG acid has a structure {-N- CH2- CH2-[-O-CH2-CH2-]n-COO-}, wherein n is 4
  MISC_FEATURE (41)..(41): C-terminal amidation

SEQ ID NO: 3158 - protein, 41 aa, Artificial Sequence; identical to SEQ ID NO: 2011
  Synthetic peptide
  MISC_FEATURE (2)..(2): Xaa is AIB
  MISC_FEATURE (40)..(40): Covalently bound to a C16 fatty acyl group via spacer comprising an amido miniPEG acid and a gamma-Glu, wherein the amido miniPEG acid has a structure {-N- CH2- CH2-[-O-CH2-CH2-]n-COO-}, wherein n is 8
  MISC_FEATURE (41)..(41): C-terminal amidation

SEQ ID NO: 3159 - protein, 39 aa, Artificial Sequence; identical to SEQ ID NO: 2010
  Synthetic peptide
  MISC_FEATURE (2)..(2): Xaa is AIB
  MISC_FEATURE (10)..(10): Covalently bound to a Lys spacer, wherein the Lys spacer is attached to two C16 fatty acyl groups, wherein each C16 fatty acyl group is attached to the Lys spacer via gamma-Glu spacer
  MISC_FEATURE (39)..(39): C-terminal amidation

SEQ ID NO: 3160 - protein, 40 aa, Artificial Sequence; identical to SEQ ID NO: 2209
  Synthetic peptide
  MISC_FEATURE (2)..(2): Xaa is AIB
  MISC_FEATURE (40)..(40): Covalently bound to a Lys spacer, wherein the Lys spacer is attached to two C16 fatty acyl groups, wherein each C16 fatty acyl group is attached to the Lys spacer via gamma-Glu spacer
  MISC_FEATURE (40)..(40): C-terminal amidation

SEQ ID NO: 3161 - protein, 39 aa, Artificial Sequence; identical to SEQ ID NO: 2010
  Synthetic peptide
  MISC_FEATURE (2)..(2): Xaa is AIB
  MISC_FEATURE (10)..(10): Covalently bound to a C12 fatty acyl group, which is covalently bound to a gamma-Glu spacer, which is covalently bound to a C16 fatty acyl group
  MISC_FEATURE (39)..(39): C-terminal amidation

SEQ ID NO: 3162 - protein, 40 aa, Artificial Sequence; identical to SEQ ID NO: 2211
  Synthetic peptide
  MISC_FEATURE (2)..(2): Xaa is AIB
  MISC_FEATURE (10)..(10): Covalently bound to a C16 fatty acyl group via gamma-Glu spacer
  MISC_FEATURE (40)..(40): Covalently bound to a C16 fatty acyl group via gamma-Glu spacer
  MISC_FEATURE (40)..(40): C-terminal amidation

SEQ ID NO: 3163 - protein, 41 aa, Artificial Sequence
  Synthetic peptide
  MISC_FEATURE (2)..(2): Xaa is AIB
  MISC_FEATURE (40)..(40): Sulfur of Cys is S-alkylated with -C(COO)H(CH2)13CH3
  MISC_FEATURE (41)..(41): C-terminal amidation
HXQGTFTSDYSKYLDERAAQDFVQWLLDGGPSSGAPPPSCG

SEQ ID NO: 3164 - protein, 41 aa, Artificial Sequence; identical to SEQ ID NO: 2011
  Synthetic peptide
  MISC_FEATURE (2)..(2): Xaa is AIB
  MISC_FEATURE (40)..(40): Lys covalently bound to Cys, the sulfur of which is S-alkylated with -C(COO)H(CH2)13CH3
  MISC_FEATURE (41)..(41): C-terminal amidation

SEQ ID NO: 3165 - protein, 41 aa, Artificial Sequence; identical to SEQ ID NO: 2011
  Synthetic peptide
  MISC_FEATURE (2)..(2): Xaa is AIB
  MISC_FEATURE (40)..(40): Covalently bound to gamma-Glu, which is bound to Cys, the sulfur of which is S-alkylated with -C(COO)H(CH2)13CH3
  MISC_FEATURE (41)..(41): C-terminal amidation

SEQ ID NO: 3166 - protein, 41 aa, Artificial Sequence; identical to SEQ ID NO: 2011
  Synthetic peptide
  MISC_FEATURE (2)..(2): Xaa is AIB
  MISC_FEATURE (40)..(40): Covalently bound to Cys, which is covalently bound to gamma-Glu, which is covalently bound to C16 fatty acyl group
  MISC_FEATURE (41)..(41): C-terminal amidation

SEQ ID NO: 3167 - protein, 41 aa, Artificial Sequence; identical to SEQ ID NO: 2011
  Synthetic peptide
  MISC_FEATURE (2)..(2): Xaa is AIB
  MISC_FEATURE (40)..(40): Covalently bound to Cys spacer, which is bound to gamma-Glu, which is bound to C16 fatty acyl group
  MISC_FEATURE (40)..(40): Covalently bound to SEQ ID NO 167 via Cys spacer which is disulfide bonded to a 2nd Cys, which the 2nd Cys is bound to Lys at position 40 of SEQ ID NO 167 and is bound to gamma-Glu, which, in turn is bound to C16 fatty acyl group
  MISC_FEATURE (41)..(41): C-terminal amidation

SEQ ID NO: 3168 - protein, 41 aa, Artificial Sequence; identical to SEQ ID NO: 2011
  Synthetic peptide
  MISC_FEATURE (2)..(2): Xaa is AIB
  MISC_FEATURE (40)..(40): Covalently bound to Cys, which is bound to gamma-Glu, which is bound to C16 fatty acyl group and the sulfer of the Cys is thioether linked to a peptide of SEQ ID NO: 231 via Lys at position 40
  MISC_FEATURE (41)..(41): C-terminal amidation

SEQ ID NO: 3169 - protein, 41 aa, Artificial Sequence; identical to SEQ ID NO: 2011
  Synthetic peptide
  MISC_FEATURE (2)..(2): Xaa is AIB
  MISC_FEATURE (40)..(40): Covalently bound to Cys, which is bound to gamma-Glu, which is bound to C16 fatty acyl group, and the sulfur of the Cys is disulfide bonded to a 2nd Cys, which the 2nd Cys is bound to a peptide of SEQ ID NO: 231 via Lys at position 40
  MISC_FEATURE (41)..(41): C-terminal amidation

SEQ ID NO: 3170 - protein, 41 aa, Artificial Sequence; identical to SEQ ID NO: 2216
  Synthetic peptide
  MISC_FEATURE (2)..(2): Xaa is AIB
  MISC_FEATURE (40)..(40): Covalently bound to C16 fatty acyl group via gamma-Glu-gamma-Glu spacer
  MISC_FEATURE (41)..(41): C-terminal amidation

SEQ ID NO: 3171 - protein, 40 aa, Artificial Sequence; identical to SEQ ID NO: 766
  Synthetic peptide
  MISC_FEATURE (2)..(2): Xaa is AIB
  MISC_FEATURE (20)..(20): Xaa is AIB
  MISC_FEATURE (24)..(24): Covalently bound to PEG
  MISC_FEATURE (40)..(40): Covalently bound to C8 fatty acyl group
  MISC_FEATURE (40)..(40): C-terminal amidation

SEQ ID NO: 3172 - protein, 40 aa, Artificial Sequence; identical to SEQ ID NO: 766
  Synthetic peptide
  MISC_FEATURE (2)..(2): Xaa is AIB
  MISC_FEATURE (20)..(20): Xaa is AIB
  MISC_FEATURE (24)..(24): Covalently bound to PEG
  MISC_FEATURE (40)..(40): Covalently bound to C12 fatty acyl group
  MISC_FEATURE (40)..(40): C-terminal amidation

SEQ ID NO: 3173 - protein, 40 aa, Artificial Sequence; identical to SEQ ID NO: 766
  Synthetic peptide
  MISC_FEATURE (2)..(2): Xaa is AIB
  MISC_FEATURE (20)..(20): Xaa is AIB
  MISC_FEATURE (24)..(24): Covalently bound to PEG
  MISC_FEATURE (40)..(40): Covalently bound to C14 fatty acyl group
  MISC_FEATURE (40)..(40): C-terminal amidation

SEQ ID NO: 3174 - protein, 40 aa, Artificial Sequence; identical to SEQ ID NO: 760
  Synthetic peptide
  MISC_FEATURE (2)..(2): Xaa is AIB
  MISC_FEATURE (20)..(20): Xaa is AIB
  MISC_FEATURE (40)..(40): Covantly bound to PEG
  MISC_FEATURE (40)..(40): C-terminal amidation

SEQ ID NO: 3175 - protein, 41 aa, Artificial Sequence; identical to SEQ ID NO: 2011
  Synthetic peptide
  MISC_FEATURE (2)..(2): Xaa is AIB
  MISC_FEATURE (40)..(40): Covalently bound to C14 succinoyl
  MISC_FEATURE (41)..(41): C-terminal amidation

SEQ ID NO: 3176 - protein, 41 aa, Artificial Sequence; identical to SEQ ID NO: 2011
  Synthetic peptide
  MISC_FEATURE (2)..(2): Xaa is AIB
  MISC_FEATURE (40)..(40): Covalently bound to C16 fatty acyl group
  MISC_FEATURE (41)..(41): C-terminal amidation

SEQ ID NO: 3177 - protein, 41 aa, Artificial Sequence; identical to SEQ ID NO: 2222
  Synthetic peptide
  MISC_FEATURE (2)..(2): Xaa is AIB
  MISC_FEATURE (10)..(10): Xaa is Tyr or an amino acid covalently bound to a C10 to C26 acyl or alkyl group
  MISC_FEATURE (18)..(18): Xaa is Arg or Ala
  MISC_FEATURE (20)..(20): Xaa is AIB or Gln
  MISC_FEATURE (21)..(21): Xaa is Asp or Glu
  MISC_FEATURE (28)..(28): Xaa is Asp of Glu
  MISC_FEATURE (35)..(35): Xaa is Ala, Arg or Lys
  MISC_FEATURE (40)..(40): Xaa is absent or is Gly (e.g. when position 10 is not Tyr) or is an amino acid covalently bound to a C10-C26 acyl or alkyl group
  MISC_FEATURE (41)..(41): Optionally present, when residue at position 40 is an amino acid covalently bound to C10-C26 acyl or alkyl group, Xaa is Gly
  MISC_FEATURE (41)..(41): C-terminal amidation

SEQ ID NO: 3178 - protein, 41 aa, Artificial Sequence; identical to SEQ ID NO: 2223
  Synthetic peptide
  MISC_FEATURE (2)..(2): Xaa is AIB
  MISC_FEATURE (10)..(10): Xaa is Tyr or an amino acid covalently bound to a C10 to C26 acyl or alkyl group
  MISC_FEATURE (18)..(18): Xaa is Arg or Ala
  MISC_FEATURE (20)..(20): Xaa is AIB or Gln
  MISC_FEATURE (21)..(21): Xaa is Asp or Glu
  MISC_FEATURE (40)..(40): Xaa is absent or is Gly (e.g. when position 10 is not Tyr) or is an amino acid covalently bound to a C10-C26 acyl or alkyl group
  MISC_FEATURE (41)..(41): Optionally present, when residue at position 40 is an amino acid covalently bound to C10-C26 acyl or alkyl group then Xaa is Gly
  MISC_FEATURE (41)..(41): C-terminal amidation

SEQ ID NO: 3179 - protein, 41 aa, Artificial Sequence; identical to SEQ ID NO: 2011
  Synthetic peptide
  MISC_FEATURE (2)..(2): Xaa is AIB
  MISC_FEATURE (40)..(40): Covalently bound to C16 fatty acyl group via gamma-Glu-gamma-Glu spacer
  MISC_FEATURE (41)..(41): C-terminal amidation

SEQ ID NO: 3180 - protein, 29 aa, Artificial Sequence
  Synthetic peptide
  MISC_FEATURE (1)..(29): At least one amino acid is an amino acid covalently bound to a C10 to C26 acyl or alkyl group
  MISC_FEATURE (2)..(2): Xaa is AIB
  MISC_FEATURE (3)..(3): Xaa is Gln or Gln analog
  MISC_FEATURE (10)..(10): Xaa is Lys or Tyr
  MISC_FEATURE (18)..(18): Xaa is Arg or Ala
  MISC_FEATURE (20)..(20): Xaa is AIB or Gln
  MISC_FEATURE (21)..(21): Xaa is Asp or Glu
  MISC_FEATURE (29)..(29): Xaa is Thr or Gly
  MISC_FEATURE (29)..(29): C-terminal amidation
HXXGTFTSDXSKYLDERXAXXFVQWLLDX

SEQ ID NO: 3181 - protein, 29 aa, Artificial Sequence
  Synthetic peptide
  MISC_FEATURE (2)..(2): Xaa is AIB
  MISC_FEATURE (3)..(3): Xaa is Gln or Gln analog
  MISC_FEATURE (10)..(10): Xaa is Lys covalently bound to a C10-C26 acyl or alkyl group
  MISC_FEATURE (18)..(18): Xaa is Arg or Ala
  MISC_FEATURE (20)..(20): Xaa is AIB or Gln
  MISC_FEATURE (21)..(21): Xaa is Asp or Glu
  MISC_FEATURE (29)..(29): Xaa is Gly or Thr
  MISC_FEATURE (29)..(29): C-terminal amidation
HXXGTFTSDXSKYLDERXAXXFVQWLLDX

SEQ ID NO: 3182 - protein, 10 aa, Artificial Sequence
  Synthetic peptide
GPSSGRPPPS

SEQ ID NO: 3183 - protein, 39 aa, Artificial Sequence; identical to SEQ ID NO: 2227
  Synthetic peptide
  MISC_FEATURE (2)..(2): Xaa is AIB
  MISC_FEATURE (3)..(3): Xaa is Gln or Gln analog
  MISC_FEATURE (10)..(10): Xaa is Tyr or an amino acid covalently bound to a C12 to C18 acyl or alkyl group
  MISC_FEATURE (16)..(16): Xaa is any amino acid, optionally, any amino acid other than Gly, Pro, and Ser
  MISC_FEATURE (18)..(18): Xaa is Arg or Ala
  MISC_FEATURE (20)..(20): Xaa is a negative charged amino acid or a charge-neutral amino acid, optionally, AIB or Gln
  MISC_FEATURE (21)..(21): Xaa is is an acidic amino acid, optionally, Asp or Glu
  MISC_FEATURE (27)..(27): Xaa is Leu, Ala, Nle, or Met
  MISC_FEATURE (28)..(28): Xaa is Ala or an acidic amino acid, optionally, Asp or Glu
  MISC_FEATURE (29)..(29): Xaa is Ala or Gly
  MISC_FEATURE (35)..(35): Xaa is Ala or a basic amino acid, optionally, Arg or Lys
  MISC_FEATURE (39)..(39): C-terminal amidation

SEQ ID NO: 3184 - protein, 39 aa, Artificial Sequence; identical to SEQ ID NO: 2228
  Synthetic peptide
  MISC_FEATURE (2)..(2): Xaa is AIB
  MISC_FEATURE (10)..(10): Xaa is Tyr or an amino acid covalently attached to a C12 to C18 acyl or alkyl group
  MISC_FEATURE (16)..(16): Xaa is Glu, an alpha, alpha disubstituted amino acid or Lys
  MISC_FEATURE (18)..(18): Xaa is Arg or Ala
  MISC_FEATURE (20)..(20): Xaa is AIB or Gln
  MISC_FEATURE (21)..(21): Xaa is Asp or Glu
  MISC_FEATURE (27)..(27): Xaa is Leu, Nle, or Met
  MISC_FEATURE (28)..(28): Xaa is Ala, Asp or Glu
  MISC_FEATURE (29)..(29): Xaa is Gly or Thr
  MISC_FEATURE (39)..(39): C-terminal amidation

SEQ ID NO: 3185 - protein, 29 aa, Artificial Sequence
  Synthetic peptide
  MISC_FEATURE (2)..(2): Xaa is AIB
  MISC_FEATURE (3)..(3): Xaa is Gln or Gln analog
  MISC_FEATURE (10)..(10): Xaa is Tyr or an amino acid covalently attached to a C10 to C26 acyl or alkyl group
  MISC_FEATURE (16)..(16): Xaa is any amino acid, optionally, any amino acid other than Gly, Pro, and Ser
  MISC_FEATURE (18)..(18): Xaa is Arg or Ala
  MISC_FEATURE (20)..(20): Xaa is a negative charged amino acid or a charge-neutral amino acid, optionally, AIB or Gln
  MISC_FEATURE (21)..(21): Xaa is an acidic amino acid, optionally, Asp or Glu
  MISC_FEATURE (27)..(27): Xaa is Leu, Ala, Nle, or Met
  MISC_FEATURE (28)..(28): Xaa is Ala or an acidic amino acid, optionally, Asp or Glu
  MISC_FEATURE (29)..(29): Xaa is Ala, Gly or Thr
  MISC_FEATURE (29)..(29): C-terminal amidation
HXXGTFTSDXSKYLDXRXAXXFVQWLXXX

SEQ ID NO: 3186 - protein, 29 aa, Artificial Sequence
  Synthetic peptide
  MISC_FEATURE (2)..(2): Xaa is AIB
  MISC_FEATURE (10)..(10): Xaa is Tyr or an amino acid covalently bound to a C10 to C26 acyl or alkyl group
  MISC_FEATURE (16)..(16): Xaa is Glu, alpha, alpha-disubstituted amino acid, or Lys
  MISC_FEATURE (18)..(18): Xaa is Arg or Ala
  MISC_FEATURE (20)..(20): Xaa is a negative charged amino acid or a charge-neutral amino acid, optionally, AIB or Gln
  MISC_FEATURE (21)..(21): Xaa is Asp or Glu
  MISC_FEATURE (27)..(27): Xaa is Leu, Ala, Nle, or Met
  MISC_FEATURE (28)..(28): Xaa is Ala, Asp or Glu
  MISC_FEATURE (29)..(29): Xaa is Gly or Thr
  MISC_FEATURE (29)..(29): C-terminal amidation
HXQGTFTSDXSKYLDXRXAXXFVQWLXXX

SEQ ID NO: 3187 - protein, 39 aa, Artificial Sequence; identical to SEQ ID NO: 2227
  Synthetic peptide
  MISC_FEATURE (2)..(2): Xaa is AIB
  MISC_FEATURE (3)..(3): Xaa is an acidic, basic or hydrophobic amino acid, optionally, Glu
  MISC_FEATURE (10)..(10): Xaa is Tyr or an amino acid covalently bound to a C12 to C18 acyl or alkyl group
  MISC_FEATURE (16)..(16): Xaa can be any amino acid, optionally any amino acid other than Gly, Pro or Ser
  MISC_FEATURE (18)..(18): Xaa is Arg or Ala
  MISC_FEATURE (20)..(20): Xaa is a negative charged amino acid or a charge-neutral amino acid, optionally, AIB or Gln
  MISC_FEATURE (21)..(21): Xaa is an acidic amino acid, optionally, Asp or Glu
  MISC_FEATURE (27)..(27): Xaa is Leu, Ala, Nle, or Met
  MISC_FEATURE (28)..(28): Xaa is Ala or an acidic amino acid, optionally, Asp or Glu
  MISC_FEATURE (29)..(29): Xaa is Ala or Gly
  MISC_FEATURE (35)..(35): Xaa is Ala or a basic amino acid, optionally, Arg or Lys
  MISC_FEATURE (39)..(39): C-terminal amidation

SEQ ID NO: 3188 - protein, 39 aa, Artificial Sequence; identical to SEQ ID NO: 2232
  Synthetic peptide
  MISC_FEATURE (2)..(2): Xaa is AIB
  MISC_FEATURE (10)..(10): Xaa is Tyr or an amino acid covalently attached to a C12 to C18 acyl or alkyl group
  MISC_FEATURE (16)..(16): Xaa is Glu, an alpha, alpha disubstituted amino acid or Lys
  MISC_FEATURE (18)..(18): Xaa is Arg or Ala
  MISC_FEATURE (20)..(20): Xaa is AIB or Gln
  MISC_FEATURE (21)..(21): Xaa is Asp or Glu
  MISC_FEATURE (27)..(27): Xaa is Leu, Nle, or Met
  MISC_FEATURE (28)..(28): Xaa is Ala, Asp or Glu
  MISC_FEATURE (29)..(29): Xaa is Gly or Thr
  MISC_FEATURE (39)..(39): C-terminal amidation

SEQ ID NO: 3189 - protein, 29 aa, Artificial Sequence
  Synthetic peptide
  MISC_FEATURE (2)..(2): Xaa is AIB
  MISC_FEATURE (3)..(3): Xaa is an acidic, basic or hydrophobic amino acid, optionally, is Glu
  MISC_FEATURE (10)..(10): Xaa is Tyr or an amino acid covalently bound to a C10 to C26 acyl or alkyl group
  MISC_FEATURE (16)..(16): Xaa is any amino acid, optionally, any amino acid other than Gly, Pro, and Ser
  MISC_FEATURE (18)..(18): Xaa is Arg or Ala
  MISC_FEATURE (20)..(20): Xaa is a negative charged amino acid or a charge-neutral amino acid, optionally, AIB or Gln
  MISC_FEATURE (21)..(21): Xaa is an acidic amino acid, optionally, Asp or Glu
  MISC_FEATURE (27)..(27): Xaa is Leu, Ala, Nle, or Met
  MISC_FEATURE (28)..(28): Xaa is Ala or an acidic amino acid, optionally, Asp or Glu
  MISC_FEATURE (29)..(29): Xaa is Ala, Gly or Thr
  MISC_FEATURE (29)..(29): C-terminal amidation
HXXGTFTSDXSKYLDXRXAXXFVQWLXXX

SEQ ID NO: 3190 - protein, 29 aa, Artificial Sequence
  Synthetic peptide
  MISC_FEATURE (2)..(2): Xaa is AIB
  MISC_FEATURE (10)..(10): Xaa is Tyr or an amino acid covalently bound to a C10 to C26 acyl or alkyl group
  MISC_FEATURE (16)..(16): Xaa is Glu, alpha, alpha-disubstituted amino acid, or Lys
  MISC_FEATURE (18)..(18): Xaa is Arg or Ala
  MISC_FEATURE (20)..(20): Xaa is a negative charged amino acid or a charge-neutral amino acid, optionally, AIB or Gln
  MISC_FEATURE (21)..(21): Xaa is Asp or Glu
  MISC_FEATURE (27)..(27): Xaa is Leu, Ala, Nle, or Met
  MISC_FEATURE (28)..(28): Xaa is Ala, Asp or Glu
  MISC_FEATURE (29)..(29): Xaa is Gly or Thr
  MISC_FEATURE (29)..(29): C-terminal amidation
HXEGTFTSDXSKYLDXRXAXXFVQWLXXX

SEQ ID NO: 3191 - protein, 39 aa, Artificial Sequence; identical to SEQ ID NO: 2227
  Synthetic peptide
  MISC_FEATURE (2)..(2): Xaa is AIB
  MISC_FEATURE (3)..(3): Xaa is Gln or Gln analog or acidic, basic or hydrophobic amino acid, optionally, is Glu or Gln
  MISC_FEATURE (10)..(10): Xaa is Tyr or an amino acid covalently bound to a C12 to C18 acyl or alkyl group
  MISC_FEATURE (16)..(16): Xaa is any amino acid, optionally, any amino acid other than Gly, Pro, and Ser
  MISC_FEATURE (18)..(18): Xaa is Arg or Ala
  MISC_FEATURE (20)..(20): Xaa is a negative charged amino acid or a charge-neutral amino acid, optionally, AIB or Gln
  MISC_FEATURE (21)..(21): Xaa is an acidic amino acid, optionally, Asp or Glu
  MISC_FEATURE (27)..(27): Xaa is Leu, Ala, Nle, or Met
  MISC_FEATURE (28)..(28): Xaa is Ala or an acidic amino acid, optionally, Asp or Glu
  MISC_FEATURE (29)..(29): Xaa is Ala or Gly
  MISC_FEATURE (35)..(35): Xaa is Ala or a basic amino acid, optionally, Arg or Lys
  MISC_FEATURE (39)..(39): C-terminal amidation

SEQ ID NO: 3192 - protein, 39 aa, Artificial Sequence; identical to SEQ ID NO: 2236
  Synthetic peptide
  MISC_FEATURE (2)..(2): Xaa is AIB
  MISC_FEATURE (3)..(3): Xaa is Gln or Gln analog or acidic, basic or hydrophobic amino acid, optionally, is Glu or Gln
  MISC_FEATURE (10)..(10): Xaa is Tyr or an amino acid covalently bound to a C12 to C18 acyl or alkyl group
  MISC_FEATURE (16)..(16): Xaa is Glu, an alpha, alpha disubstituted amino acid or Lys
  MISC_FEATURE (18)..(18): Xaa is Arg or Ala
  MISC_FEATURE (20)..(20): Xaa is AIB or Gln
  MISC_FEATURE (21)..(21): Xaa is Asp or Glu
  MISC_FEATURE (27)..(27): Xaa is Leu, Nle, or Met
  MISC_FEATURE (28)..(28): Xaa is Ala, Asp or Glu
  MISC_FEATURE (29)..(29): Xaa is Gly or Thr
  MISC_FEATURE (39)..(39): C-terminal amidation

SEQ ID NO: 3193 - protein, 29 aa, Artificial Sequence
  Synthetic peptide
  MISC_FEATURE (2)..(2): Xaa is AIB
  MISC_FEATURE (3)..(3): Xaa is Gln or Gln analog or acidic, basic or hydrophobic amino acid, optionally, is Glu or Gln
  MISC_FEATURE (10)..(10): Xaa is Tyr or an amino acid covalently bound to a C10 to C26 acyl or alkyl group
  MISC_FEATURE (16)..(16): Xaa is any amino acid, optionally, any amino acid other than Gly, Pro, and Ser
  MISC_FEATURE (18)..(18): Xaa is Arg or Ala
  MISC_FEATURE (20)..(20): Xaa is a negative charged amino acid or a charge-neutral amino acid, optionally, AIB or Gln
  MISC_FEATURE (21)..(21): Xaa is an acidic amino acid, optionally, Asp or Glu
  MISC_FEATURE (27)..(27): Xaa is Leu, Ala, Nle, or Met
  MISC_FEATURE (28)..(28): Xaa is Ala or an acidic amino acid, optionally, Asp or Glu
  MISC_FEATURE (29)..(29): Xaa is Ala, Gly or Thr
  MISC_FEATURE (29)..(29): C-terminal amidation
HXXGTFTSDXSKYLDXRXAXXFVQWLXXX

SEQ ID NO: 3194 - protein, 29 aa, Artificial Sequence
  Synthetic peptide
  MISC_FEATURE (2)..(2): Xaa is AIB
  MISC_FEATURE (3)..(3): Xaa is Gln or Gln analog or acidic, basic or hydrophobic amino acid, optionally, is Glu or Gln
  MISC_FEATURE (10)..(10): Xaa is Tyr or an amino acid covalently bound to a C10 to C26 acyl or alkyl group
  MISC_FEATURE (16)..(16): Xaa is Glu, alpha, alpha-disubstituted amino acid, or Lys
  MISC_FEATURE (18)..(18): Xaa is Arg or Ala
  MISC_FEATURE (20)..(20): Xaa is a negative charged amino acid or a charge-neutral amino acid, optionally, AIB or Gln
  MISC_FEATURE (21)..(21): Xaa is Asp or Glu
  MISC_FEATURE (27)..(27): Xaa is Leu, Ala, Nle, or Met
  MISC_FEATURE (28)..(28): Xaa is Ala, Asp or Glu
  MISC_FEATURE (29)..(29): Xaa is Gly or Thr
  MISC_FEATURE (29)..(29): C-terminal amidation
HXXGTFTSDXSKYLDXRXAXXFVQWLXXX

SEQ ID NO: 3195 - protein, 39 aa, Artificial Sequence; identical to SEQ ID NO: 2227
  Synthetic peptide
  MISC_FEATURE (2)..(3): Xaa can be any amino acid
  MISC_FEATURE (10)..(10): Xaa can be any amino acid
  MISC_FEATURE (16)..(16): Xaa can be any amino acid
  MISC_FEATURE (18)..(18): Xaa can be any amino acid
  MISC_FEATURE (20)..(21): Xaa can be any amino acid
  MISC_FEATURE (27)..(29): Xaa can be any amino acid
  MISC_FEATURE (35)..(35): Xaa can be any amino acid
  MISC_FEATURE (39)..(39): C-terminal amidation

SEQ ID NO: 3196 - protein, 39 aa, Artificial Sequence; identical to SEQ ID NO: 2236
  Synthetic peptide
  MISC_FEATURE (2)..(3): Xaa can be any amino acid
  MISC_FEATURE (10)..(10): Xaa can be any amino acid
  MISC_FEATURE (16)..(16): Xaa can be any amino acid
  MISC_FEATURE (18)..(18): Xaa can be any amino acid
  MISC_FEATURE (20)..(21): Xaa can be any amino acid
  MISC_FEATURE (27)..(29): Xaa can be any amino acid
  MISC_FEATURE (39)..(39): C-terminal amidation

SEQ ID NO: 3197 - protein, 29 aa, Artificial Sequence
  Synthetic peptide
  MISC_FEATURE (2)..(3): Xaa can be any amino acid
  MISC_FEATURE (10)..(10): Xaa can be any amino acid
  MISC_FEATURE (16)..(16): Xaa can be any amino acid
  MISC_FEATURE (18)..(18): Xaa can be any amino acid
  MISC_FEATURE (20)..(21): Xaa can be any amino acid
  MISC_FEATURE (27)..(29): Xaa can be any amino acid
  MISC_FEATURE (29)..(29): C-terminal amidation
HXXGTFTSDXSKYLDXRXAXXFVQWLXXX

SEQ ID NO: 3198 - protein, 29 aa, Artificial Sequence
  Synthetic peptide
  MISC_FEATURE (2)..(3): Xaa can be any amino acid
  MISC_FEATURE (10)..(10): Xaa can be any amino acid
  MISC_FEATURE (16)..(16): Xaa can be any amino acid
  MISC_FEATURE (18)..(18): Xaa can be any amino acid
  MISC_FEATURE (20)..(21): Xaa can be any amino acid
  MISC_FEATURE (27)..(29): Xaa can be any amino acid
  MISC_FEATURE (29)..(29): C-terminal amidation
HXXGTFTSDXSKYLDXRXAXXFVQWLXXX

SEQ ID NO: 3199 - protein, 5 aa, Artificial Sequence
  Synthetic peptide
ERAAQ

SEQ ID NO: 3200 - protein, 6 aa, Artificial Sequence
  Synthetic peptide
ERAAQD

SEQ ID NO: 3201 - skipped

SEQ ID NO: 3202 - protein, 41 aa, Artificial Sequence; identical to SEQ ID NO: 2051
  Synthetic peptide
  MISC_FEATURE (2)..(2): Xaa is AIB
  MISC_FEATURE (40)..(40): Covalently bound to C16 fatty acyl group via gamma-Glu-gamma-Glu spacer
  MISC_FEATURE (41)..(41): C-terminal amidation

SEQ ID NO: 3203 - protein, 41 aa, Artificial Sequence; identical to SEQ ID NO: 2052
  Synthetic peptide
  MISC_FEATURE (2)..(2): Xaa is AIB
  MISC_FEATURE (40)..(40): Covalently bound to C16 fatty acyl group via gamma-Glu-gamma-Glu spacer
  MISC_FEATURE (41)..(41): C-terminal amidation

SEQ ID NO: 3204 - protein, 40 aa, Artificial Sequence; identical to SEQ ID NO: 2241
  Synthetic peptide
  MISC_FEATURE (2)..(2): Xaa is AIB
  MISC_FEATURE (10)..(10): Covalently bound to C16 fatty acyl group via gamma-Glu spacer
  MISC_FEATURE (40)..(40): C-terminal amidation

SEQ ID NO: 3205 - protein, 39 aa, Artificial Sequence; identical to SEQ ID NO: 2242
  Synthetic peptide
  MISC_FEATURE (2)..(2): Xaa is AIB
  MISC_FEATURE (10)..(10): Covalently bound to C16 fatty acyl group via gamma-Glu spacer
  MISC_FEATURE (39)..(39): C-terminal amidation

SEQ ID NO: 3206 - protein, 40 aa, Artificial Sequence; identical to SEQ ID NO: 2241
  Synthetic peptide
  MISC_FEATURE (2)..(2): Xaa is AIB
  MISC_FEATURE (10)..(10): Covalently bound to C16 fatty acyl group via gamma-Glu-gamma-Glu spacer
  MISC_FEATURE (40)..(40): C-terminal amidation

SEQ ID NO: 3207 - protein, 41 aa, Artificial Sequence; identical to SEQ ID NO: 2244
  Synthetic peptide
  MISC_FEATURE (2)..(2): Xaa is AIB
  MISC_FEATURE (40)..(40): Covalently bound to Lys spacer, wherein Lys spacer is bound via the alpha amine to a gamma-Glu spacer, which is bound to a C16 fatty acyl group and Lys spacer is bound via the epsilon amine to gamma-Glu which is bound to a C16 fatty acyl group
  MISC_FEATURE (41)..(41): C-terminal amidation

SEQ ID NO: 3208 - skipped

SEQ ID NO: 3209 - protein, 41 aa, Artificial Sequence; identical to SEQ ID NO: 2244
  Synthetic peptide
  MISC_FEATURE (2)..(2): Xaa is AIB
  MISC_FEATURE (40)..(40): Covalently bound to a Lys spacer, wherein the Lys spacer is bound to (1) C16 fatty acyl group via a gamma-Glu spacer and (2) C8 fatty acyl group via a gamma-Glu spacer
  MISC_FEATURE (41)..(41): C-terminal amidation

SEQ ID NO: 3210 - protein, 41 aa, Artificial Sequence; identical to SEQ ID NO: 2244
  Synthetic peptide
  MISC_FEATURE (2)..(2): Xaa is AIB
  MISC_FEATURE (40)..(40): Covalently bound to a Lys spacer, wherein the Lys spacer is bound to (1) C16 fatty acyl group via a gamma-Glu spacer and (2) C12 fatty acyl group via a gamma-Glu spacer
  MISC_FEATURE (41)..(41): C-terminal amidation

SEQ ID NO: 3211 - protein, 41 aa, Artificial Sequence; identical to SEQ ID NO: 2247
  Synthetic peptide
  MISC_FEATURE (2)..(2): Xaa is AIB
  MISC_FEATURE (40)..(40): Covalently bound to C16 fatty acyl group via side chain hydroxyl of Tyr
  MISC_FEATURE (41)..(41): C-terminal amidation

SEQ ID NO: 3212-3217 - skipped (6 entries)

SEQ ID NO: 3218 - protein, 40 aa, Artificial Sequence; identical to SEQ ID NO: 1165
  Synthetic peptide
  MISC_FEATURE: MT-345
  MOD_RES (2)..(2): Xaa is AIB
  MOD_RES (40)..(40): Acylated with a C14 fatty acyl group
  MOD_RES (40)..(40): C-terminal amidation

SEQ ID NO: 3219 - protein, 40 aa, Artificial Sequence; identical to SEQ ID NO: 1165
  Synthetic peptide
  MISC_FEATURE: MT-346
  MOD_RES (2)..(2): Xaa is AIB
  MOD_RES (40)..(40): C-terminal amidation

SEQ ID NO: 3220 - protein, 40 aa, Artificial Sequence; identical to SEQ ID NO: 2249
  Synthetic peptide
  MISC_FEATURE: MT-347
  MOD_RES (2)..(2): Xaa is AIB
  MOD_RES (16)..(16): Xaa is AIB
  MOD_RES (40)..(40): Acylated with a C14 fatty acyl group
  MOD_RES (40)..(40): C-terminal amidation

SEQ ID NO: 3221 - protein, 40 aa, Artificial Sequence; identical to SEQ ID NO: 2249
  Synthetic peptide
  MISC_FEATURE: MT-348
  MOD_RES (2)..(2): Xaa is AIB
  MOD_RES (16)..(16): Xaa is AIB
  MOD_RES (40)..(40): C-terminal amidation

SEQ ID NO: 3222 - protein, 40 aa, Artificial Sequence; identical to SEQ ID NO: 1165
  Synthetic peptide
  MISC_FEATURE: MT-349
  MOD_RES (2)..(2): Xaa is AIB
  MOD_RES (24)..(24): Covalently bound to 40kDa PEG via thioether made by reaction of peptide with haloacetyl-activated PEG
  MOD_RES (40)..(40): Acylated with a C14 fatty acyl group
  MOD_RES (40)..(40): C-terminal amidation

SEQ ID NO: 3223 - protein, 40 aa, Artificial Sequence; identical to SEQ ID NO: 1165
  Synthetic peptide
  MISC_FEATURE: MT-350
  MOD_RES (2)..(2): Xaa is AIB
  MOD_RES (24)..(24): Covalently bound to 40kDa PEG via thioether made by reaction of peptide with haloacetyl-activated PEG
  MOD_RES (40)..(40): C-terminal amidation

SEQ ID NO: 3224 - protein, 40 aa, Artificial Sequence; identical to SEQ ID NO: 2249
  Synthetic peptide
  MISC_FEATURE: MT-351
  MOD_RES (2)..(2): Xaa is AIB
  MOD_RES (16)..(16): Xaa is AIB
  MOD_RES (24)..(24): Covalently bound to 40kDa PEG via thioether made by reaction of peptide with haloacetyl-activated PEG
  MOD_RES (40)..(40): Acylated with a C14 fatty acyl group
  MOD_RES (40)..(40): C-terminal amidation

SEQ ID NO: 3225 - protein, 40 aa, Artificial Sequence; identical to SEQ ID NO: 2249
  Synthetic peptide
  MISC_FEATURE: MT-352
  MOD_RES (2)..(2): Xaa is AIB
  MOD_RES (16)..(16): Xaa is AIB
  MOD_RES (24)..(24): Covalently bound to 40kDa PEG via thioether made by reaction of peptide with haloacetyl-activated PEG
  MOD_RES (40)..(40): C-terminal amidation

SEQ ID NO: 3226 - skipped

SEQ ID NO: 3227 - protein, 40 aa, Artificial Sequence
  Synthetic peptide
  MISC_FEATURE: MT-361
  MOD_RES (2)..(2): Xaa is AIB
  MOD_RES (16)..(16): Xaa is AIB
  MOD_RES (40)..(40): C-terminal amidation
HXQGTFTSDYSIYLDXQAAKEFVNWLMNGGPSSGAPPPSK

SEQ ID NO: 3228 - protein, 40 aa, Artificial Sequence; identical to SEQ ID NO: 2252
  Synthetic peptide
  MISC_FEATURE: MT-364
  MOD_RES (2)..(2): Xaa is AIB
  MOD_RES (40)..(40): Acylated with a C16 fatty acyl group
  MOD_RES (40)..(40): C-terminal amidation

SEQ ID NO: 3229 - protein, 40 aa, Artificial Sequence
  Synthetic peptide
  MISC_FEATURE (2)..(2): Xaa is AIB
  MISC_FEATURE (40)..(40): C-terminal amidation
HXQGTFTSDYSIYLDEKRAKEFVCWLLAGGPSSGAPPPSK

SEQ ID NO: 3230 - protein, 41 aa, Artificial Sequence; identical to SEQ ID NO: 2011
  Synthetic peptide
  MISC_FEATURE (2)..(2): Xaa is AIB
  MISC_FEATURE (41)..(41): C-terminal amidation

SEQ ID NO: 3231 - skipped

SEQ ID NO: 3232 - protein, 39 aa, Artificial Sequence; identical to SEQ ID NO: 1198
  Synthetic peptide
  MISC_FEATURE (2)..(2): Xaa is AIB
  MISC_FEATURE (10)..(10): Xaa is 4-amino-Phe
  MISC_FEATURE (10)..(10): 4-amino-Phe covalently bound a C16 fatty acyl group via spacer comprising two acidic residues
  MISC_FEATURE (20)..(20): Xaa is AIB
  MISC_FEATURE (39)..(39): C-terminal amidation

SEQ ID NO: 3233 - protein, 41 aa, Artificial Sequence; identical to SEQ ID NO: 2193
  Synthetic peptide
  MISC_FEATURE (2)..(2): Xaa is AIB
  MISC_FEATURE (40)..(40): Xaa is 4-amino-Phe
  MISC_FEATURE (40)..(40): 4-amino-Phe covalently bound to a C16 fatty acyl group via spacer comprising two acidic residues
  MISC_FEATURE (41)..(41): C-terminal amidation

SEQ ID NO: 3234 - protein, 39 aa, Artificial Sequence; identical to SEQ ID NO: 2195
  Synthetic peptide
  MISC_FEATURE (2)..(2): Xaa is AIB
  MISC_FEATURE (6)..(6): Xaa is 4-amino-Phe
  MISC_FEATURE (6)..(6): 4-amino-Phe covalently bound to C16 fatty acyl group via spacer comprising acidic residue
  MISC_FEATURE (39)..(39): C-terminal amidation

SEQ ID NO: 3235 - protein, 39 aa, Artificial Sequence; identical to SEQ ID NO: 2196
  Synthetic peptide
  MISC_FEATURE (2)..(2): Xaa is AIB
  MISC_FEATURE (10)..(10): Xaa is 4-amino-Phe
  MISC_FEATURE (10)..(10): 4-amino-Phe covalently bound to C16 fatty acyl group via spacer comprising acidic residue
  MISC_FEATURE (39)..(39): C-terminal amidation

SEQ ID NO: 3236 - protein, 39 aa, Artificial Sequence; identical to SEQ ID NO: 2197
  Synthetic peptide
  MISC_FEATURE (2)..(2): Xaa is AIB
  MISC_FEATURE (13)..(13): Xaa is 4-amino-Phe
  MISC_FEATURE (13)..(13): 4-amino-Phe covalently bound to C16 fatty acyl group via spacer comprising acidic residue
  MISC_FEATURE (39)..(39): C-terminal amidation

SEQ ID NO: 3237 - protein, 39 aa, Artificial Sequence; identical to SEQ ID NO: 2199
  Synthetic peptide
  MOD_RES (2)..(2): Xaa is AIB
  MOD_RES (13)..(13): Covalently bound to a C16 fatty acyl group via spacer comprising acidic residue
  MOD_RES (39)..(39): C-terminal amidation

SEQ ID NO: 3238 - protein, 39 aa, Artificial Sequence; identical to SEQ ID NO: 2200
  Synthetic peptide
  MISC_FEATURE (2)..(2): Xaa is AIB
  MISC_FEATURE (14)..(14): Covalently bound to a C16 fatty acyl group via spacer comprising acidic residue
  MISC_FEATURE (39)..(39): C-terminal amidation

SEQ ID NO: 3239 - protein, 39 aa, Artificial Sequence; identical to SEQ ID NO: 2201
  Synthetic peptide
  MISC_FEATURE (2)..(2): Xaa is AIB
  MISC_FEATURE (16)..(16): Covalently bound to C16 fatty acyl group via spacer comprising acidic residue
  MISC_FEATURE (39)..(39): C-terminal amidation

SEQ ID NO: 3240 - protein, 39 aa, Artificial Sequence; identical to SEQ ID NO: 2202
  Synthetic peptide
  MISC_FEATURE (2)..(2): Xaa is AIB
  MISC_FEATURE (17)..(17): Covalently bound to C16 fatty acyl group via spacer comprising acidic residue
  MISC_FEATURE (39)..(39): C-terminal amidation

SEQ ID NO: 3241 - protein, 41 aa, Artificial Sequence; identical to SEQ ID NO: 2011
  Synthetic peptide
  MISC_FEATURE (2)..(2): Xaa is AIB
  MISC_FEATURE (40)..(40): Covalently bound to a C16 fatty acyl group via spacer comprising acidic residue
  MISC_FEATURE (41)..(41): C-terminal amidation

SEQ ID NO: 3242 - protein, 41 aa, Artificial Sequence; identical to SEQ ID NO: 2011
  Synthetic peptide
  MISC_FEATURE (2)..(2): Xaa is AIB
  MISC_FEATURE (40)..(40): Covalently bound to C16 fatty acyl group via a spacer comprising an amido miniPEG acid and an acidic amino acid, wherein the amido miniPEG acid has a structure {-N- CH2- CH2-[-O-CH2-CH2-]n-COO-}, wherein n is 2
  MISC_FEATURE (41)..(41): C-terminal amidation

SEQ ID NO: 3243 - protein, 41 aa, Artificial Sequence; identical to SEQ ID NO: 2011
  Synthetic peptide
  MISC_FEATURE (2)..(2): Xaa is AIB
  MISC_FEATURE (40)..(40): Covalently bound to a C16 fatty acyl group via spacer comprising an amido miniPEG acid and an acidic amino acid, wherein the amido miniPEG acid has a structure {-N- CH2- CH2-[-O-CH2-CH2-]n-COO-}, wherein n is 4
  MISC_FEATURE (41)..(41): C-terminal amidation

SEQ ID NO: 3244 - protein, 41 aa, Artificial Sequence; identical to SEQ ID NO: 2011
  Synthetic peptide
  MISC_FEATURE (2)..(2): Xaa is AIB
  MISC_FEATURE (40)..(40): Covalently bound to a C16 fatty acyl group via spacer comprising an amido miniPEG acid and an acidic amino acid, wherein the amido miniPEG acid has a structure {-N- CH2- CH2-[-O-CH2-CH2-]n-COO-}, wherein n is 8
  MISC_FEATURE (41)..(41): C-terminal amidation

SEQ ID NO: 3245 - protein, 39 aa, Artificial Sequence; identical to SEQ ID NO: 2010
  Synthetic peptide
  MISC_FEATURE (2)..(2): Xaa is AIB
  MISC_FEATURE (10)..(10): Covalently bound to a Lys spacer, wherein the Lys spacer is attached to two C16 fatty acyl groups, wherein each C16 fatty acyl group is attached to the Lys spacer via spacer comprising an acidic residue
  MISC_FEATURE (39)..(39): C-terminal amidation

SEQ ID NO: 3246 - protein, 40 aa, Artificial Sequence; identical to SEQ ID NO: 2209
  Synthetic peptide
  MISC_FEATURE (2)..(2): Xaa is AIB
  MISC_FEATURE (40)..(40): Covalently bound to a Lys spacer, wherein the Lys spacer is attached to two C16 fatty acyl groups, wherein each C16 fatty acyl group is attached to the Lys spacer via spacer comprising an acidic residue
  MISC_FEATURE (40)..(40): C-terminal amidation

SEQ ID NO: 3247 - protein, 39 aa, Artificial Sequence; identical to SEQ ID NO: 2010
  Synthetic peptide
  MISC_FEATURE (2)..(2): Xaa is AIB
  MISC_FEATURE (10)..(10): Covalently bound to a C12 fatty acyl group, which is covalently bound to a spacer comprising an acidic residue, which is covalently bound to a C16 fatty acyl group
  MISC_FEATURE (39)..(39): C-terminal amidation

SEQ ID NO: 3248 - protein, 40 aa, Artificial Sequence; identical to SEQ ID NO: 2211
  Synthetic peptide
  MISC_FEATURE (2)..(2): Xaa is AIB
  MISC_FEATURE (10)..(10): Covalently bound to a C16 fatty acyl group via acidic amino acid spacer
  MISC_FEATURE (40)..(40): Covalently bound to a C16 fatty acyl group via spacer comprising an acidic residue
  MISC_FEATURE (40)..(40): C-terminal amidation

SEQ ID NO: 3249 - protein, 41 aa, Artificial Sequence; identical to SEQ ID NO: 2011
  Synthetic peptide
  MISC_FEATURE (2)..(2): Xaa is AIB
  MISC_FEATURE (40)..(40): Covalently bound to an acidic residue, which is bound to Cys, the sulfur of which is S-alkylated with -C(COO)H(CH2)13CH3
  MISC_FEATURE (41)..(41): C-terminal amidation

SEQ ID NO: 3250 - protein, 41 aa, Artificial Sequence; identical to SEQ ID NO: 2011
  Synthetic peptide
  MISC_FEATURE (2)..(2): Xaa is AIB
  MISC_FEATURE (40)..(40): Covalently bound to Cys, which is covalently bound to an acidic residue, which is covalently bound to C16 fatty acyl group
  MISC_FEATURE (41)..(41): C-terminal amidation

SEQ ID NO: 3251 - protein, 41 aa, Artificial Sequence; identical to SEQ ID NO: 2011
  Synthetic peptide
  MISC_FEATURE (2)..(2): Xaa is AIB
  MISC_FEATURE (40)..(40): Covalently bound to Cys spacer, which is bound to an acidic residue, which is bound to C16 fatty acyl group
  MISC_FEATURE (40)..(40): Covalently bound to SEQ ID 251 via Cys spacer which is disulfide bonded to a 2nd Cys, which the 2nd Cys is bound to Lys at position 40 of SEQ ID 251 and is bound to an acidic residue, which, in turn is bound to C16 fatty acyl group
  MISC_FEATURE (41)..(41): C-terminal amidation

SEQ ID NO: 3252 - protein, 41 aa, Artificial Sequence; identical to SEQ ID NO: 2011
  Synthetic peptide
  MISC_FEATURE (2)..(2): Xaa is AIB
  MISC_FEATURE (40)..(40): Covalently bound to Cys, which is bound to an acidic residue, which is bound to C16 fatty acyl group and the sulfer of the Cys is thioether linked to a peptide of SEQ ID NO: 231 via Lys at position 40
  MISC_FEATURE (41)..(41): C-terminal amidation

SEQ ID NO: 3253 - protein, 41 aa, Artificial Sequence; identical to SEQ ID NO: 2011
  Synthetic peptide
  MISC_FEATURE (2)..(2): Xaa is AIB
  MISC_FEATURE (40)..(40): Covalently bound to Cys, which is bound to an acidic residue, which is bound to C16 fatty acyl group, and the sulfur of the Cys is disulfide bonded to a 2nd Cys, which the 2nd Cys is bound to a peptide of SEQ ID NO: 231 via Lys at position 40
  MISC_FEATURE (41)..(41): C-terminal amidation

SEQ ID NO: 3254 - protein, 41 aa, Artificial Sequence; identical to SEQ ID NO: 2216
  Synthetic peptide
  MISC_FEATURE (2)..(2): Xaa is AIB
  MISC_FEATURE (40)..(40): Covalently bound to C16 fatty acyl group via spacer comprising two acidic residues
  MISC_FEATURE (41)..(41): C-terminal amidation

SEQ ID NO: 3255 - protein, 41 aa, Artificial Sequence; identical to SEQ ID NO: 2011
  Synthetic peptide
  MISC_FEATURE (2)..(2): Xaa is AIB
  MISC_FEATURE (40)..(40): Covalently bound to C16 fatty acyl group via spacer comprising two acidic residues
  MISC_FEATURE (41)..(41): C-terminal amidation

SEQ ID NO: 3256 - protein, 41 aa, Artificial Sequence; identical to SEQ ID NO: 2051
  Synthetic peptide
  MISC_FEATURE (2)..(2): Xaa is AIB
  MISC_FEATURE (40)..(40): Covalently bound to C16 fatty acyl group via spacer comprising two acidic residues
  MISC_FEATURE (41)..(41): C-terminal amidation

SEQ ID NO: 3257 - protein, 41 aa, Artificial Sequence; identical to SEQ ID NO: 2052
  Synthetic peptide
  MISC_FEATURE (2)..(2): Xaa is AIB
  MISC_FEATURE (40)..(40): Covalently bound to C16 fatty acyl group via spacer comprising two acidic residues
  MISC_FEATURE (41)..(41): C-terminal amidation

SEQ ID NO: 3258 - protein, 40 aa, Artificial Sequence; identical to SEQ ID NO: 2241
  Synthetic peptide
  MISC_FEATURE (2)..(2): Xaa is AIB
  MISC_FEATURE (10)..(10): Covalently bound to C16 fatty acyl group via spacer comprising an acidic residue
  MISC_FEATURE (40)..(40): C-terminal amidation

SEQ ID NO: 3259 - protein, 39 aa, Artificial Sequence; identical to SEQ ID NO: 2242
  Synthetic peptide
  MISC_FEATURE (2)..(2): Xaa is AIB
  MISC_FEATURE (10)..(10): Covalently bound to C16 fatty acyl group via spacer comprising an acidic residue
  MISC_FEATURE (39)..(39): C-terminal amidation

SEQ ID NO: 3260 - protein, 40 aa, Artificial Sequence; identical to SEQ ID NO: 2241
  Synthetic peptide
  MISC_FEATURE (2)..(2): Xaa is AIB
  MISC_FEATURE (10)..(10): Covalently bound to C16 fatty acyl group via spacer comprising two acidic residues
  MISC_FEATURE (40)..(40): C-terminal amidation

SEQ ID NO: 3261 - protein, 41 aa, Artificial Sequence; identical to SEQ ID NO: 2244
  Synthetic peptide
  MISC_FEATURE (2)..(2): Xaa is AIB
  MISC_FEATURE (40)..(40): Covalently bound to Lys spacer, wherein Lys spacer is bound via the alpha amine to an acidic residue spacer, which is bound to a C16 fatty acyl group and Lys spacer is bound via the epsilon amine to an acidic residue which is bound to a C16 fatty acyl
  MISC_FEATURE (41)..(41): C-terminal amidation

SEQ ID NO: 3262-3270 - skipped (9 entries)

SEQ ID NO: 3271 - protein, 39 aa, Artificial Sequence
  Synthetic peptide
  MISC_FEATURE (2)..(2): Xaa is AIB
  MISC_FEATURE (39)..(39): C-terminal amidation
HXEGTFTSDYSKYLEERAAQEFVQWLLEGGPSSGAPPPS

SEQ ID NO: 3272 - protein, 39 aa, Artificial Sequence; identical to SEQ ID NO: 758
  Synthetic peptide
  MISC_FEATURE (2)..(2): Xaa is AIB
  MISC_FEATURE (10)..(10): Epsilon amino group of Lys is covalently bound to Sar-D-Lys, wherein epsilon amino group of D-Lys is acylated with a C16 fatty acyl group
  MISC_FEATURE (20)..(20): Xaa is AIB
  MISC_FEATURE (39)..(39): C-terminal amidation

SEQ ID NO: 3273 - protein, 39 aa, Artificial Sequence; identical to SEQ ID NO: 758
  Synthetic peptide
  MISC_FEATURE (2)..(2): Xaa is AIB
  MISC_FEATURE (10)..(10): Epsilon amino group of Lys is covalently bound to Sar-D-Lys, wherein epsilon amino group of D-Lys is acylated with a C18 fatty acyl group
  MISC_FEATURE (20)..(20): Xaa is AIB
  MISC_FEATURE (39)..(39): C-terminal amidation

SEQ ID NO: 3274 - protein, 39 aa, Artificial Sequence; identical to SEQ ID NO: 758
  Synthetic peptide
  MISC_FEATURE (2)..(2): Xaa is AIB
  MISC_FEATURE (10)..(10): Epsilon amino group of Lys is covalently bound to Sar-D-Lys, wherein epsilon amino group of D-Lys is acylated with a C20 fatty acyl group
  MISC_FEATURE (20)..(20): Xaa is AIB
  MISC_FEATURE (39)..(39): C-terminal amidation

SEQ ID NO: 3275 - protein, 39 aa, Artificial Sequence; identical to SEQ ID NO: 758
  Synthetic peptide
  MISC_FEATURE (2)..(2): Xaa is AIB
  MISC_FEATURE (10)..(10): Epsilon amino group of Lys is covalently bound to Sar-D-Lys, wherein epsilon amino group of D-Lys is acylated with a C22 fatty acyl group
  MISC_FEATURE (20)..(20): Xaa is AIB
  MISC_FEATURE (39)..(39): C-terminal amidation

SEQ ID NO: 3276 - protein, 39 aa, Artificial Sequence
  Synthetic peptide
  MISC_FEATURE (2)..(2): Xaa is AIB
  MISC_FEATURE (13)..(13): Xaa is 4-amino-Phe
  MISC_FEATURE (13)..(13): Amino group of 4-amino-Phe is covalently bound to Sar-D-Lys, wherein epsilon amino group of D-Lys is acylated with a C16 fatty acyl group
  MISC_FEATURE (20)..(20): Xaa is AIB
  MISC_FEATURE (39)..(39): C-terminal amidation
YXEGTFTSDYSIFLDKQAAXEFVNWLLAGGPSSGAPPPS

SEQ ID NO: 3277 - protein, 39 aa, Artificial Sequence; identical to SEQ ID NO: 3276
  Synthetic peptide
  MISC_FEATURE (2)..(2): Xaa is AIB
  MISC_FEATURE (13)..(13): Xaa is 4-amino-Phe
  MISC_FEATURE (13)..(13): Amino group of 4-amino-Phe is covalently bound to Sar-D-Lys, wherein epsilon amino group of D-Lys is acylated with a C18 fatty acyl group
  MISC_FEATURE (20)..(20): Xaa is AIB
  MISC_FEATURE (39)..(39): C-terminal amidation

SEQ ID NO: 3278 - protein, 39 aa, Artificial Sequence; identical to SEQ ID NO: 3276
  Synthetic peptide
  MISC_FEATURE (2)..(2): Xaa is AIB
  MISC_FEATURE (13)..(13): Xaa is 4-amino-Phe
  MISC_FEATURE (13)..(13): Amino group of 4-amino-Phe is covalently bound to Sar-D-Lys, wherein epsilon amino group of D-Lys is acylated with a C20 fatty acyl group
  MISC_FEATURE (20)..(20): Xaa is AIB
  MISC_FEATURE (39)..(39): C-terminal amidation

SEQ ID NO: 3279 - protein, 39 aa, Artificial Sequence; identical to SEQ ID NO: 3276
  Synthetic peptide
  MISC_FEATURE (2)..(2): Xaa is AIB
  MISC_FEATURE (13)..(13): Xaa is 4-amino-Phe
  MISC_FEATURE (13)..(13): Amino group of 4-amino-Phe is covalently bound to Sar-D-Lys, wherein epsilon amino group of D-Lys is acylated with a C22 fatty acyl group
  MISC_FEATURE (20)..(20): Xaa is AIB
  MISC_FEATURE (39)..(39): C-terminal amidation

SEQ ID NO: 3280 - protein, 39 aa, Artificial Sequence; identical to SEQ ID NO: 757
  Synthetic peptide
  MISC_FEATURE (1)..(1): Amino group of Tyr is covalently bound to Sar-D-Lys, wherein epsilon amino group of D-Lys is acylated with a C16 fatty acyl group
  MISC_FEATURE (2)..(2): Xaa is AIB
  MISC_FEATURE (20)..(20): Xaa is AIB
  MISC_FEATURE (39)..(39): C-terminal amidation

SEQ ID NO: 3281 - protein, 39 aa, Artificial Sequence; identical to SEQ ID NO: 757
  Synthetic peptide
  MISC_FEATURE (1)..(1): Amino group of Tyr is covalently bound to Sar-D-Lys, wherein epsilon amino group of D-Lys is acylated with a C18 fatty acyl group
  MISC_FEATURE (2)..(2): Xaa is AIB
  MISC_FEATURE (20)..(20): Xaa is AIB
  MISC_FEATURE (39)..(39): C-terminal amidation

SEQ ID NO: 3282 - protein, 39 aa, Artificial Sequence; identical to SEQ ID NO: 757
  Synthetic peptide
  MISC_FEATURE (1)..(1): Amino group of Tyr is covalently bound to Sar-D-Lys, wherein epsilon amino group of D-Lys is acylated with a C20 fatty acyl group
  MISC_FEATURE (2)..(2): Xaa is AIB
  MISC_FEATURE (20)..(20): Xaa is AIB
  MISC_FEATURE (39)..(39): C-terminal amidation

SEQ ID NO: 3283 - protein, 39 aa, Artificial Sequence; identical to SEQ ID NO: 757
  Synthetic peptide
  MISC_FEATURE (1)..(1): Amino group of Tyr is covalently bound to Sar-D-Lys, wherein epsilon amino group of D-Lys is acylated with a C22 fatty acyl group
  MISC_FEATURE (2)..(2): Xaa is AIB
  MISC_FEATURE (20)..(20): Xaa is AIB
  MISC_FEATURE (39)..(39): C-terminal amidation

SEQ ID NO: 3284 - protein, 39 aa, Artificial Sequence
  Synthetic peptide
  MISC_FEATURE (2)..(2): Xaa is AIB
  MISC_FEATURE (10)..(10): Xaa is 4-amino-Phe
  MISC_FEATURE (10)..(10): Amino group of 4-amino-Phe is covalently bound to Sar-D-Lys, wherein epsilon amino group of D-Lys is acylated with a C16 fatty acyl group
  MISC_FEATURE (20)..(20): Xaa is AIB
  MISC_FEATURE (39)..(39): C-terminal amidation
FXEGTFTSDFSIYLDKQAAXEFVNWLLAGGPSSGAPPPS

SEQ ID NO: 3285 - protein, 39 aa, Artificial Sequence; identical to SEQ ID NO: 3284
  Synthetic peptide
  MISC_FEATURE (2)..(2): Xaa is AIB
  MISC_FEATURE (10)..(10): Xaa is 4-amino-Phe
  MISC_FEATURE (10)..(10): Amino group of 4-amino-Phe is covalently bound to Sar-D-Lys, wherein epsilon amino group of D-Lys is acylated with a C18 fatty acyl group
  MISC_FEATURE (20)..(20): Xaa is AIB
  MISC_FEATURE (39)..(39): C-terminal amidation

SEQ ID NO: 3286 - protein, 39 aa, Artificial Sequence; identical to SEQ ID NO: 3284
  Synthetic peptide
  MISC_FEATURE (2)..(2): Xaa is AIB
  MISC_FEATURE (10)..(10): Xaa is 4-amino-Phe
  MISC_FEATURE (10)..(10): Amino group of 4-amino-Phe is covalently bound to Sar-D-Lys, wherein the epsilon amino group of the D-Lys is acylated with a C20 fatty acyl group
  MISC_FEATURE (20)..(20): Xaa is AIB
  MISC_FEATURE (39)..(39): C-terminal amidation

SEQ ID NO: 3287 - protein, 39 aa, Artificial Sequence; identical to SEQ ID NO: 3284
  Synthetic peptide
  MISC_FEATURE (2)..(2): Xaa is AIB
  MISC_FEATURE (10)..(10): Xaa is 4-amino-Phe
  MISC_FEATURE (10)..(10): Amino group of 4-amino-Phe is covalently bound to Sar-D-Lys, wherein the epsilon amino group of the D-Lys is acylated with a C22 fatty acyl group
  MISC_FEATURE (20)..(20): Xaa is AIB
  MISC_FEATURE (39)..(39): C-terminal amidation

SEQ ID NO: 3288 - protein, 39 aa, Artificial Sequence
  Synthetic peptide
  MISC_FEATURE (2)..(2): Xaa is AIB
  MISC_FEATURE (10)..(10): Epsilon amino group of Lys is covalently bound to Sar-D-Lys, wherein epsilon amino group of D-Lys is acylated with a C16 fatty acyl group
  MISC_FEATURE (20)..(20): Xaa is AIB
  MISC_FEATURE (39)..(39): C-terminal amidation
FXEGTFTSDKSIYLDKQAAXEFVNWLLAGGPSSGAPPPS

SEQ ID NO: 3289 - protein, 39 aa, Artificial Sequence; identical to SEQ ID NO: 3288
  Synthetic peptide
  MISC_FEATURE (2)..(2): Xaa is AIB
  MISC_FEATURE (10)..(10): Epsilon amino group of Lys is covalently bound to Sar-D-Lys, wherein epsilon amino group of D-Lys is acylated with a C18 fatty acyl group
  MISC_FEATURE (20)..(20): Xaa is AIB
  MISC_FEATURE (39)..(39): C-terminal amidation

SEQ ID NO: 3290 - protein, 39 aa, Artificial Sequence; identical to SEQ ID NO: 3288
  Synthetic peptide
  MISC_FEATURE (2)..(2): Xaa is AIB
  MISC_FEATURE (10)..(10): Epsilon amino group of Lys is covalently bound to Sar-D-Lys, wherein epsilon amino group of D-Lys is acylated with a C20 fatty acyl group
  MISC_FEATURE (20)..(20): Xaa is AIB
  MISC_FEATURE (39)..(39): C-terminal amidation

SEQ ID NO: 3291 - protein, 39 aa, Artificial Sequence; identical to SEQ ID NO: 3288
  Synthetic peptide
  MISC_FEATURE (2)..(2): Xaa is AIB
  MISC_FEATURE (10)..(10): Epsilon amino group of Lys is covalently bound to Sar-D-Lys, wherein epsilon amino group of D-Lys is acylated with a C22 fatty acyl group
  MISC_FEATURE (20)..(20): Xaa is AIB
  MISC_FEATURE (39)..(39): C-terminal amidation

SEQ ID NO: 3292 - protein, 39 aa, Artificial Sequence; identical to SEQ ID NO: 3284
  Synthetic peptide
  MISC_FEATURE (2)..(2): Xaa is AIB
  MISC_FEATURE (10)..(10): Xaa is 4-amino-Phe
  MISC_FEATURE (20)..(20): Xaa is AIB
  MISC_FEATURE (39)..(39): C-terminal amidation

SEQ ID NO: 3293 - protein, 39 aa, Artificial Sequence; identical to SEQ ID NO: 3284
  Synthetic peptide
  MISC_FEATURE (2)..(2): Xaa is AIB
  MISC_FEATURE (10)..(10): Xaa is 4-amino-Phe
  MISC_FEATURE (10)..(10): Amino group of 4-amino-Phe is covalently bound to Lys, wherein the epsilon amino group of the Lys is acylated with a C16 fatty acyl group
  MISC_FEATURE (20)..(20): Xaa is AIB
  MISC_FEATURE (39)..(39): C-terminal amidation

SEQ ID NO: 3294 - protein, 39 aa, Artificial Sequence; identical to SEQ ID NO: 3284
  Synthetic peptide
  MISC_FEATURE (2)..(2): Xaa is AIB
  MISC_FEATURE (10)..(10): Xaa is 4-amino-Phe
  MISC_FEATURE (10)..(10): Amino group of 4-amino-Phe is covalently bound to Lys, wherein the epsilon amino group of the Lys is acylated with a C18 fatty acyl group
  MISC_FEATURE (20)..(20): Xaa is AIB
  MISC_FEATURE (39)..(39): C-terminal amidation

SEQ ID NO: 3295 - protein, 39 aa, Artificial Sequence; identical to SEQ ID NO: 3284
  Synthetic peptide
  MISC_FEATURE (2)..(2): Xaa is AIB
  MISC_FEATURE (10)..(10): Xaa is 4-amino-Phe
  MISC_FEATURE (10)..(10): Amino group of 4-amino-Phe is covalently bound to Lys, wherein the epsilon amino group of the Lys is acylated with a C20 fatty acyl group
  MISC_FEATURE (20)..(20): Xaa is AIB
  MISC_FEATURE (39)..(39): C-terminal amidation

SEQ ID NO: 3296 - protein, 39 aa, Artificial Sequence; identical to SEQ ID NO: 3284
  Synthetic peptide
  MISC_FEATURE (2)..(2): Xaa is AIB
  MISC_FEATURE (10)..(10): Xaa is 4-amino-Phe
  MISC_FEATURE (10)..(10): Amino group of 4-amino-Phe is covalently bound to Lys, wherein the epsilon amino group of the Lys is acylated with a C22 fatty acyl group
  MISC_FEATURE (20)..(20): Xaa is AIB
  MISC_FEATURE (39)..(39): C-terminal amidation

SEQ ID NO: 3297 - protein, 39 aa, Artificial Sequence
  Synthetic peptide
  MISC_FEATURE (2)..(2): Xaa is AIB
  MISC_FEATURE (13)..(13): Xaa is 4-amino-Phe
  MISC_FEATURE (13)..(13): Amino group of 4-amino-Phe is covalently bound to Sar-D-Lys, wherein the epsilon amino group of the D-Lys is acylated with a C16 fatty acyl group
  MISC_FEATURE (20)..(20): Xaa is AIB
  MISC_FEATURE (39)..(39): C-terminal amidation
FXEGTFTSDYSIFLDKQAAXEFVNWLLAGGPSSGAPPPS

SEQ ID NO: 3298 - protein, 39 aa, Artificial Sequence; identical to SEQ ID NO: 3297
  Synthetic peptide
  MISC_FEATURE (2)..(2): Xaa is AIB
  MISC_FEATURE (13)..(13): Xaa is 4-amino-Phe
  MISC_FEATURE (13)..(13): Amino group of 4-amino-Phe is covalently bound to Sar-D-Lys, wherein the epsilon amino group of the D-Lys is acylated with a C18 fatty acyl group
  MISC_FEATURE (20)..(20): Xaa is AIB
  MISC_FEATURE (39)..(39): C-terminal amidation

SEQ ID NO: 3299 - protein, 39 aa, Artificial Sequence; identical to SEQ ID NO: 3297
  Synthetic peptide
  MISC_FEATURE (2)..(2): Xaa is AIB
  MISC_FEATURE (13)..(13): Xaa is 4-amino-Phe
  MISC_FEATURE (13)..(13): Amino group of 4-amino-Phe is covalently bound to Sar-D-Lys, wherein the epsilon amino group of the D-Lys is acylated with a C20 fatty acyl group
  MISC_FEATURE (20)..(20): Xaa is AIB
  MISC_FEATURE (39)..(39): C-terminal amidation

SEQ ID NO: 3300 - protein, 39 aa, Artificial Sequence; identical to SEQ ID NO: 3297
  Synthetic peptide
  MISC_FEATURE (2)..(2): Xaa is AIB
  MISC_FEATURE (13)..(13): Xaa is 4-amino-Phe
  MISC_FEATURE (13)..(13): Amino group of 4-amino-Phe is covalently bound to Sar-D-Lys, wherein the epsilon amino group of the D-Lys is acylated with a C22 fatty acyl group
  MISC_FEATURE (20)..(20): Xaa is AIB
  MISC_FEATURE (39)..(39): C-terminal amidation

SEQ ID NO: 3301 - protein, 39 aa, Artificial Sequence; identical to SEQ ID NO: 3297
  Synthetic peptide
  MISC_FEATURE (2)..(2): Xaa is AIB
  MISC_FEATURE (13)..(13): Xaa is 4-amino-Phe
  MISC_FEATURE (13)..(13): Amino group of 4-amino-Phe is covalently bound to Lys, wherein the epsilon amino group of the Lys is acylated with a C16 fatty acyl group
  MISC_FEATURE (20)..(20): Xaa is AIB
  MISC_FEATURE (39)..(39): C-terminal amidation

SEQ ID NO: 3302 - protein, 39 aa, Artificial Sequence; identical to SEQ ID NO: 3297
  Synthetic peptide
  MISC_FEATURE (2)..(2): Xaa is AIB
  MISC_FEATURE (13)..(13): Xaa is 4-amino-Phe
  MISC_FEATURE (13)..(13): Amino group of 4-amino-Phe is covalently bound to Lys, wherein the epsilon amino group of the Lys is acylated with a C18 fatty acyl group
  MISC_FEATURE (20)..(20): Xaa is AIB
  MISC_FEATURE (39)..(39): C-terminal amidation

SEQ ID NO: 3303 - protein, 39 aa, Artificial Sequence; identical to SEQ ID NO: 3297
  Synthetic peptide
  MISC_FEATURE (2)..(2): Xaa is AIB
  MISC_FEATURE (13)..(13): Xaa is 4-amino-Phe
  MISC_FEATURE (13)..(13): Amino group of 4-amino-Phe is covalently bound to Lys, wherein the epsilon amino group of the Lys is acylated with a C20 fatty acyl group
  MISC_FEATURE (20)..(20): Xaa is AIB
  MISC_FEATURE (39)..(39): C-terminal amidation

SEQ ID NO: 3304 - protein, 39 aa, Artificial Sequence; identical to SEQ ID NO: 3297
  Synthetic peptide
  MISC_FEATURE (2)..(2): Xaa is AIB
  MISC_FEATURE (13)..(13): Xaa is 4-amino-Phe
  MISC_FEATURE (13)..(13): Amino group of 4-amino-Phe is covalently bound to Lys, wherein the epsilon amino group of the Lys is acylated with a C22 fatty acyl group
  MISC_FEATURE (20)..(20): Xaa is AIB
  MISC_FEATURE (39)..(39): C-terminal amidation

SEQ ID NO: 3305 - protein, 39 aa, Artificial Sequence
  Synthetic peptide
  MISC_FEATURE (2)..(2): Xaa is AIB
  MISC_FEATURE (12)..(12): Epsilon amino group of Lys is covalently bound to Sar-D-Lys, wherein epsilon amino group of D-Lys is acylated with a C16 fatty acyl group
  MISC_FEATURE (20)..(20): Xaa is AIB
  MISC_FEATURE (39)..(39): C-terminal amidation
YXEGTFTSDYSKYLDKQAAXEFVNWLLAGGPSSGAPPPS

SEQ ID NO: 3306 - protein, 39 aa, Artificial Sequence; identical to SEQ ID NO: 3305
  Synthetic peptide
  MISC_FEATURE (2)..(2): Xaa is AIB
  MISC_FEATURE (12)..(12): Epsilon amino group of Lys is covalently bound to Sar-D-Lys, wherein epsilon amino group of D-Lys is acylated with a C18 fatty acyl group
  MISC_FEATURE (20)..(20): Xaa is AIB
  MISC_FEATURE (39)..(39): C-terminal amidation

SEQ ID NO: 3307 - protein, 39 aa, Artificial Sequence; identical to SEQ ID NO: 3305
  Synthetic peptide
  MISC_FEATURE (2)..(2): Xaa is AIB
  MISC_FEATURE (12)..(12): Epsilon amino group of Lys is covalently bound to Sar-D-Lys, wherein epsilon amino group of D-Lys is acylated with a C20 fatty acyl group
  MISC_FEATURE (20)..(20): Xaa is AIB
  MISC_FEATURE (39)..(39): C-terminal amidation

SEQ ID NO: 3308 - protein, 39 aa, Artificial Sequence; identical to SEQ ID NO: 3305
  Synthetic peptide
  MISC_FEATURE (2)..(2): Xaa is AIB
  MISC_FEATURE (12)..(12): Epsilon amino group of Lys is covalently bound to Sar-D-Lys, wherein epsilon amino group of D-Lys is acylated with a C22 fatty acyl group
  MISC_FEATURE (20)..(20): Xaa is AIB
  MISC_FEATURE (39)..(39): C-terminal amidation

SEQ ID NO: 3309 - protein, 39 aa, Artificial Sequence; identical to SEQ ID NO: 757
  Synthetic peptide
  MISC_FEATURE (2)..(2): Xaa is AIB
  MISC_FEATURE (16)..(16): Epsilon amino group of Lys is covalently bound to Sar-D-Lys, wherein epsilon amino group of D-Lys is acylated with a C16 fatty acyl group
  MISC_FEATURE (20)..(20): Xaa is AIB
  MISC_FEATURE (39)..(39): C-terminal amidation

SEQ ID NO: 3310 - protein, 39 aa, Artificial Sequence; identical to SEQ ID NO: 757
  Synthetic peptide
  MISC_FEATURE (2)..(2): Xaa is AIB
  MISC_FEATURE (16)..(16): Epsilon amino group of Lys is covalently bound to Sar-D-Lys, wherein epsilon amino group of D-Lys is acylated with a C18 fatty acyl group
  MISC_FEATURE (20)..(20): Xaa is AIB
  MISC_FEATURE (39)..(39): C-terminal amidation

SEQ ID NO: 3311 - protein, 39 aa, Artificial Sequence; identical to SEQ ID NO: 757
  Synthetic peptide
  MISC_FEATURE (2)..(2): Xaa is AIB
  MISC_FEATURE (16)..(16): Epsilon amino group of Lys is covalently bound to Sar-D-Lys, wherein epsilon amino group of D-Lys is acylated with a C20 fatty acyl group
  MISC_FEATURE (20)..(20): Xaa is AIB
  MISC_FEATURE (39)..(39): C-terminal amidation

SEQ ID NO: 3312 - protein, 39 aa, Artificial Sequence; identical to SEQ ID NO: 757
  Synthetic peptide
  MISC_FEATURE (2)..(2): Xaa is AIB
  MISC_FEATURE (16)..(16): Epsilon amino group of Lys is covalently bound to Sar-D-Lys, wherein epsilon amino group of D-Lys is acylated with a C22 fatty acyl group
  MISC_FEATURE (20)..(20): Xaa is AIB
  MISC_FEATURE (39)..(39): C-terminal amidation

SEQ ID NO: 3313 - protein, 40 aa, Artificial Sequence; identical to SEQ ID NO: 756
  Synthetic peptide
  MISC_FEATURE (2)..(2): Xaa is AIB
  MISC_FEATURE (20)..(20): Xaa is AIB
  MISC_FEATURE (40)..(40): Epsilon amino group of Lys is covalently bound to Sar-D-Lys, wherein epsilon amino group of D-Lys is acylated with a C16 fatty acyl group
  MISC_FEATURE (40)..(40): C-terminal amidation

SEQ ID NO: 3314 - protein, 40 aa, Artificial Sequence; identical to SEQ ID NO: 756
  Synthetic peptide
  MISC_FEATURE (2)..(2): Xaa is AIB
  MISC_FEATURE (20)..(20): Xaa is AIB
  MISC_FEATURE (40)..(40): Epsilon amino group of Lys is covalently bound to Sar-D-Lys, wherein epsilon amino group of D-Lys is acylated with a C18 fatty acyl group
  MISC_FEATURE (40)..(40): C-terminal amidation

SEQ ID NO: 3315 - protein, 40 aa, Artificial Sequence; identical to SEQ ID NO: 756
  Synthetic peptide
  MISC_FEATURE (2)..(2): Xaa is AIB
  MISC_FEATURE (20)..(20): Xaa is AIB
  MISC_FEATURE (40)..(40): Epsilon amino group of Lys is covalently bound to Sar-D-Lys, wherein epsilon amino group of D-Lys is acylated with a C20 fatty acyl group
  MISC_FEATURE (40)..(40): C-terminal amidation

SEQ ID NO: 3316 - protein, 40 aa, Artificial Sequence; identical to SEQ ID NO: 756
  Synthetic peptide
  MISC_FEATURE (2)..(2): Xaa is AIB
  MISC_FEATURE (20)..(20): Xaa is AIB
  MISC_FEATURE (40)..(40): Epsilon amino group of Lys is covalently bound to Sar-D-Lys, wherein epsilon amino group of D-Lys is acylated with a C22 fatty acyl group
  MISC_FEATURE (40)..(40): C-terminal amidation

SEQ ID NO: 3317 - protein, 39 aa, Artificial Sequence; identical to SEQ ID NO: 757
  Synthetic peptide
  MISC_FEATURE (2)..(2): Xaa is AIB
  MISC_FEATURE (16)..(16): Epsilon amino group of Lys is covalently bound to Lys, wherein epsilon amino group of the Lys is acylated with a C16 fatty acyl group
  MISC_FEATURE (20)..(20): Xaa is AIB
  MISC_FEATURE (39)..(39): C-terminal amidation

SEQ ID NO: 3318 - protein, 39 aa, Artificial Sequence; identical to SEQ ID NO: 757
  Synthetic peptide
  MISC_FEATURE (2)..(2): Xaa is AIB
  MISC_FEATURE (16)..(16): Epsilon amino group of Lys is covalently bound to Lys, wherein epsilon amino group of the Lys is acylated with a C18 fatty acyl group
  MISC_FEATURE (20)..(20): Xaa is AIB
  MISC_FEATURE (39)..(39): C-terminal amidation

SEQ ID NO: 3319 - protein, 39 aa, Artificial Sequence; identical to SEQ ID NO: 757
  Synthetic peptide
  MISC_FEATURE (2)..(2): Xaa is AIB
  MISC_FEATURE (16)..(16): Epsilon amino group of Lys is covalently bound to Lys, wherein epsilon amino group of the Lys is acylated with a C20 fatty acyl group
  MISC_FEATURE (20)..(20): Xaa is AIB
  MISC_FEATURE (39)..(39): C-terminal amidation

SEQ ID NO: 3320 - protein, 39 aa, Artificial Sequence; identical to SEQ ID NO: 757
  Synthetic peptide
  MISC_FEATURE (2)..(2): Xaa is AIB
  MISC_FEATURE (16)..(16): Epsilon amino group of Lys is covalently bound to Lys, wherein epsilon amino group of the Lys is acylated with a C22 fatty acyl group
  MISC_FEATURE (20)..(20): Xaa is AIB
  MISC_FEATURE (39)..(39): C-terminal amidation

SEQ ID NO: 3321 - protein, 40 aa, Artificial Sequence; identical to SEQ ID NO: 756
  Synthetic peptide
  MISC_FEATURE (2)..(2): Xaa is AIB
  MISC_FEATURE (20)..(20): Xaa is AIB
  MISC_FEATURE (40)..(40): Epsilon amino group of Lys is covalently bound to Lys, wherein epsilon amino group of the Lys is acylated with a C16 fatty acyl group
  MISC_FEATURE (40)..(40): C-terminal amidation

SEQ ID NO: 3322 - protein, 40 aa, Artificial Sequence; identical to SEQ ID NO: 756
  Synthetic peptide
  MISC_FEATURE (2)..(2): Xaa is AIB
  MISC_FEATURE (20)..(20): Xaa is AIB
  MISC_FEATURE (40)..(40): Epsilon amino group of Lys is covalently bound to Lys, wherein epsilon amino group of the Lys is acylated with a C18 fatty acyl group
  MISC_FEATURE (40)..(40): C-terminal amidation

SEQ ID NO: 3323 - protein, 40 aa, Artificial Sequence; identical to SEQ ID NO: 756
  Synthetic peptide
  MISC_FEATURE (2)..(2): Xaa is AIB
  MISC_FEATURE (20)..(20): Xaa is AIB
  MISC_FEATURE (40)..(40): Epsilon amino group of Lys is covalently bound to Lys, wherein epsilon amino group of the Lys is acylated with a C20 fatty acyl group
  MISC_FEATURE (40)..(40): C-terminal amidation

SEQ ID NO: 3324 - protein, 40 aa, Artificial Sequence; identical to SEQ ID NO: 756
  Synthetic peptide
  MISC_FEATURE (2)..(2): Xaa is AIB
  MISC_FEATURE (20)..(20): Xaa is AIB
  MISC_FEATURE (40)..(40): Epsilon amino group of Lys is covalently bound to Lys, wherein epsilon amino group of the Lys is acylated with a C22 fatty acyl group
  MISC_FEATURE (40)..(40): C-terminal amidation

SEQ ID NO: 3325 - protein, 39 aa, Artificial Sequence; identical to SEQ ID NO: 3288
  Synthetic peptide
  MISC_FEATURE (2)..(2): Xaa is AIB
  MISC_FEATURE (20)..(20): Xaa is AIB
  MISC_FEATURE (39)..(39): C-terminal amidation

SEQ ID NO: 3326 - protein, 39 aa, Artificial Sequence; identical to SEQ ID NO: 3305
  Synthetic peptide
  MISC_FEATURE (2)..(2): Xaa is AIB
  MISC_FEATURE (20)..(20): Xaa is AIB
  MISC_FEATURE (39)..(39): C-terminal amidation

SEQ ID NO: 3327 - protein, 39 aa, Artificial Sequence; identical to SEQ ID NO: 757
  Synthetic peptide
  MISC_FEATURE (2)..(2): Xaa is AIB
  MISC_FEATURE (20)..(20): Xaa is AIB
  MISC_FEATURE (39)..(39): C-terminal amidation

SEQ ID NO: 3328 - protein, 40 aa, Artificial Sequence; identical to SEQ ID NO: 756
  Synthetic peptide
  MISC_FEATURE (2)..(2): Xaa is AIB
  MISC_FEATURE (20)..(20): Xaa is AIB
  MISC_FEATURE (40)..(40): C-terminal amidation

SEQ ID NO: 3329 - protein, 39 aa, Artificial Sequence; identical to SEQ ID NO: 758
  Synthetic peptide
  MISC_FEATURE (2)..(2): Xaa is AIB
  MISC_FEATURE (10)..(10): Epsilon amino group of Lys is covalently bound to Sar-D-Lys, wherein epsilon amino group of D-Lys is acylated with a C20-C28 fatty acyl group
  MISC_FEATURE (20)..(20): Xaa is AIB
  MISC_FEATURE (39)..(39): C-terminal amidation

SEQ ID NO: 3330 - protein, 39 aa, Artificial Sequence; identical to SEQ ID NO: 3276
  Synthetic peptide
  MISC_FEATURE (2)..(2): Xaa is AIB
  MISC_FEATURE (13)..(13): Xaa is 4-amino-Phe
  MISC_FEATURE (13)..(13): Amino group of 4-amino-Phe is covalently bound to Sar-D-Lys, wherein epsilon amino group of D-Lys is acylated with a C20-C28 fatty acyl group
  MISC_FEATURE (20)..(20): Xaa is AIB
  MISC_FEATURE (39)..(39): C-terminal amidation

SEQ ID NO: 3331 - protein, 39 aa, Artificial Sequence; identical to SEQ ID NO: 757
  Synthetic peptide
  MISC_FEATURE (1)..(1): Amino group of Tyr is covalently bound to Sar-D-Lys, wherein epsilon amino group of D-Lys is acylated with a C20-C28 fatty acyl group
  MISC_FEATURE (2)..(2): Xaa is AIB
  MISC_FEATURE (20)..(20): Xaa is AIB
  MISC_FEATURE (39)..(39): C-terminal amidation

SEQ ID NO: 3332 - protein, 39 aa, Artificial Sequence; identical to SEQ ID NO: 3284
  Synthetic peptide
  MISC_FEATURE (2)..(2): Xaa is AIB
  MISC_FEATURE (10)..(10): Xaa is 4-amino-Phe
  MISC_FEATURE (10)..(10): Amino group of 4-amino-Phe is covalently bound to Sar-D-Lys, wherein epsilon amino group of D-Lys is acylated with a C20-C28 fatty acyl group
  MISC_FEATURE (20)..(20): Xaa is AIB
  MISC_FEATURE (39)..(39): C-terminal amidation

SEQ ID NO: 3333 - protein, 39 aa, Artificial Sequence; identical to SEQ ID NO: 3288
  Synthetic peptide
  MISC_FEATURE (2)..(2): Xaa is AIB
  MISC_FEATURE (10)..(10): Epsilon amino group of Lys is covalently bound to Sar-D-Lys, wherein epsilon amino group of D-Lys is acylated with a C20-C28 fatty acyl group
  MISC_FEATURE (20)..(20): Xaa is AIB
  MISC_FEATURE (39)..(39): C-terminal amidation

SEQ ID NO: 3334 - protein, 39 aa, Artificial Sequence; identical to SEQ ID NO: 3297
  Synthetic peptide
  MISC_FEATURE (2)..(2): Xaa is AIB
  MISC_FEATURE (13)..(13): Xaa is 4-amino-Phe
  MISC_FEATURE (13)..(13): Amino group of 4-amino-Phe is covalently bound to Sar-D-Lys, wherein the epsilon amino group of the D-Lys is acylated with a C20-C28 fatty acyl group
  MISC_FEATURE (20)..(20): Xaa is AIB
  MISC_FEATURE (39)..(39): C-terminal amidation

SEQ ID NO: 3335 - protein, 39 aa, Artificial Sequence; identical to SEQ ID NO: 3305
  Synthetic peptide
  MISC_FEATURE (2)..(2): Xaa is AIB
  MISC_FEATURE (12)..(12): Epsilon amino group of Lys is covalently bound to Sar-D-Lys, wherein epsilon amino group of D-Lys is acylated with a C20-C28 fatty acyl group
  MISC_FEATURE (20)..(20): Xaa is AIB
  MISC_FEATURE (39)..(39): C-terminal amidation

SEQ ID NO: 3336 - protein, 39 aa, Artificial Sequence; identical to SEQ ID NO: 757
  Synthetic peptide
  MISC_FEATURE (2)..(2): Xaa is AIB
  MISC_FEATURE (16)..(16): Epsilon amino group of Lys is covalently bound to Sar-D-Lys, wherein epsilon amino group of D-Lys is acylated with a C20-C28 fatty acyl group
  MISC_FEATURE (20)..(20): Xaa is AIB
  MISC_FEATURE (39)..(39): C-terminal amidation

SEQ ID NO: 3337 - protein, 40 aa, Artificial Sequence; identical to SEQ ID NO: 756
  Synthetic peptide
  MISC_FEATURE (2)..(2): Xaa is AIB
  MISC_FEATURE (20)..(20): Xaa is AIB
  MISC_FEATURE (40)..(40): Epsilon amino group of Lys is covalently bound to Sar-D-Lys, wherein epsilon amino group of D-Lys is acylated with a C20-C28 fatty acyl group
  MISC_FEATURE (40)..(40): C-terminal amidation
